(19) United States
(12) Patent Application Publication
(10) Pub. No.: US 2021/0247394 A1
(43) Pub. Date: Aug. 12, 2021

(54) ISOLATED BACTERIAL STRAIN FOR INDUCING PROLIFERATION OR ACCUMULATION OF REGULATORY T-CELLS

(71) Applicant: ICAHN SCHOOL OF MEDICINE AT MOUNT SINAI, New York, NY (US)

(72) Inventors: Graham BRITTON, New York, NY (US); Jeremiah FAITH, New York, NY (US); Zhihua LI, Summit, NJ (US); Ilaria MOGNO, New York, NY (US)

(73) Assignee: Icahn School of Medicine at Mount Sinai, New York, NY (US)

(21) Appl. No.: 17/049,012

(22) PCT Filed: Apr. 19, 2019
(86) PCT No.: PCT/US2019/028238

§ 371 Date: Oct. 19, 2020

Related U.S. Application Data
(60) Provisional application No. 62/662,453, filed on Apr. 25, 2018.

(51) Int. Cl. G01N 33/569; C12Q 1/689; A61K 35/744

(52) U.S. Cl. CPC G01N 33/56916; C12Q 1/689; A61K 2035/115; C12Q 2600/136; A61K 35/744

(57) ABSTRACT

The present invention relates to methods of using bacterial strain 1687A6 in detecting, diagnosing and treating disease or disorders of the GI tract. The present invention also relates to modulating the immune responses of an individual by inducing Th17 cell differentiation, proliferation, or accumulation. Further, the invention relates to therapeutic compositions containing strain 1687A6 or compounds derived from it and methods for treating disease in a subject using such compositions.

### CROSS REFERENCE TO PRIOR APPLICATIONS

[0001] This application is a § 371 national stage of PCT International Application No. PCT/US2019/028238, filed Apr. 19, 2019, claiming the benefit of U.S. Provisional Application No. 62/662,453, filed Apr. 25, 2018, the contents of which is incorporated herein by reference in its entirety.

### SEQUENCE LISTING

[0002] The instant application contains a Sequence Listing which has been submitted electronically in ASCII format and is hereby incorporated by reference in its entirety. Said ASCII copy, created on May 28, 2019, is named MS-0004-WO-PCT_SL.txt and is 6,387,952 bytes in size.

### FIELD OF THE INVENTION

[0003] The present invention relates generally to diagnosing, treating, and monitoring the progression of inflammatory bowel disease in a subject, including, for example, by monitoring treatment. The present invention also relates to a method for inducing or inhibiting proliferation or accumulation of Th17 cells or modulating an immune response, inflammation, or a drug response. Such method may include reduction of inflammation caused by Th17 cells in the gastrointestinal tract via a drug, vaccine, probiotic, or other means. Such method may also include induction or modulation of the immune response in the body in response to a specific microbial strain or to a physiologically active substance derived from that strain. Diagnosis and monitoring can be achieved by tracking biomarkers in the subject that are associated with the specific microbial strain identified.

### BACKGROUND

[0004] The mammalian gastrointestinal (GI) tract harbors a diverse microbial community that is usually maintained in symbiotic balance. Interactions between microbes within the microbial populations, and between the microbes and the host, affect both the host and the internal microbial community. For example, a majority of the mammalian immune system is directed at the GI tract. This may affect the internal microbial community structure, by eliminating some microbes and enabling the expansion of others. Even the host diet shapes the GI microbial community often by introducing new microbes, benefitting some microbes, or inhibiting others.

[0005] A healthy GI microbiome also benefits the host. It can render the host resistant to colonization by a broad spectrum of pathogens, provide immune stimulation, promote maintenance of a healthy gut epithelium, and provide essential nutrients such as vitamin K for absorption. In some individuals, this symbiotic balance is disrupted. This state can lead to disruption of microbial functions and lead to increased susceptibility to pathogens, induction of inflammatory signaling cascades that result in autoimmunity, and disruption of nutrient absorption. Consequently, the GI microbiome is a significant element in the pathogenesis of many diseases and disorders. Some patients become more susceptible to pathogenic infections after the use of broad-spectrum antibiotics that disrupt the normal intestinal microbiota flora. Many of these diseases and disorders, such as inflammatory bowel disease (IBD) are chronic conditions that significantly decrease a patient's quality of life and can be ultimately fatal.

[0006] IBD describes a variety of intestinal disorders, including Crohn's disease (CD) and ulcerative colitis (UC), which are all characterized by dysregulated GI immune responses and localized inflammatory signals in affected patients. Recent research has focused on the presence of specific strains of bacteria and the accumulation of Th17 immune cells in the GI as markers of IBD and of the associated inflammatory signals. One study found that adherent and invasive E. coli strains are enriched in the gut of patients with Crohn's disease. Darfeuille-Michaud, A., et al., (2004) Gastroenterology, 127(2): 412. Some studies have correlated specific bacteria with differentation of Th17 cells in mouse models of IBD. Ivanov, II., et al., (2008) Cell Host Microbe, 4(4): 337 and Tan, T.G., et al., (2016) PNAS USA, 113(50): E8141. And a recent study shows that IgA coated E. coli induce inflammation and Th17 accumulation in the gut of Crohn's disease patients. Viladomiu, M., et al., (2017) Sci Transl Med, 9(376). GI related T-cell activation has also been implicated in anti-cancer therapies. Chaput, et al., (2017) Annals of Oncology 28: 1368. One study has also shown that induction of Th17 cells by gut microbiota provide protection from gut pathogens. Ivanov, II, et al., (2009) Cell 139(3): 485.

[0007] But to date, no microbial strain has been found that specifically induces accumulation or proliferation of Th17 cells in the human gut or that causes IBD in a human. Thus, there is a need in the art for improved methods for detecting, staging, and treating subjects for the presence of specific bacteria that induce Th17 associated inflammation in a human and that cause IBD. There is also a need for identifying bacterial strains that stimulate Th17 cells and can be used to modulate inflammation and immune responses. The present invention fulfills these needs by identifying for the first time a specific strain of E. coli that induces Th17 cell differentiation and accumulation in a microbial community and that is associated with IBD disease progression.

### SUMMARY OF THE INVENTION

[0008] The present invention identifies for the first time a microbial strain isolated from the human gut that causes Th17 associated inflammation in the gut in the context of a complex existing microbiota.

[0009] One aspect of the present invention provides a specific microbe that induces T-cell differentiation and inflammation in the gut of patients with IBD.

[0010] Another aspect of the present invention provides a biological marker for diagnosing IBD.

[0011] Another aspect of the present invention provides a biological marker for staging or tracking IBD.

[0012] Another aspect of the present invention provides a biological marker and a method for treating IBD.

[0013] Another aspect of the present invention provides a method of screening for compositions and methods to treat or prevent IBD.

[0014] Another aspect of the present invention provides a bacterial strain that can modulate an immune reaction in a subject.

[0015] Another aspect of the present invention provides a therapeutic composition for modulating an immune response in a subject.

[0016] Another aspect of the present invention provides a therapeutic composition for treatment of a subject alone or in combination with other therapeutic compositions to stimulate an immune response.

[0017] Another aspect of the present invention provides a method for inducing proliferation or accumulation of Th17 cells, as well as a method for inhibiting such proliferation or accumulation.

[0018] Another aspect of the present invention provides a vaccine composition containing a bacterial strain or a physiologically active substance derived from it.

[0019] Another aspect of the present invention provides a method for treating or preventing at least one disease or condition selected from infectious diseases, cancer, and autoimmune diseases.

[0020] Another aspect of the present invention provides a method for identifying strain specific substances that induce the differentiation, accumulation, or proliferation of Th17 cells.

[0021] The invention provides a method in which the absolute amount or the ratio of Escherichia coli 1687A6 (“strain 1687A6”) bacteria in a microbiota of an individual with IBD is determined and can be compared with the baseline value of the amount of strain 1687A6 in a healthy individual to provide an IBD diagnosis, prognosis, or treatment regimen.

[0022] In one embodiment, the invention provides a method in which the absolute amount or the ratio of strain 1687A6 bacteria in a microbiota of an individual with IBD is determined, and, when a therapeutically active composition is administered to the individual that reduces the ratio or the absolute value of the strain 1687A6 bacteria in comparison with a base line value in a healthy individual, it is determined that the therapeutically active composition is effective in treating IBD.

[0023] In one embodiment, the method further comprises measuring the levels of strain 1687A6 in the microbiota of the subject after administration of a therapeutic composition, wherein an increase in the percentage or absolute number of strain 1687A6 after administration of the therapeutic composition relative to levels prior to the administration is a positive indicator of enhanced immunosuppression (or immunoregulation). The measurement of the composition of the subject's microbiota can be made with techniques known in the art, such as metagenomic sequencing.

[0024] One embodiment of the present invention provides a method for detecting strain 1687A6 in a fecal sample by: (a) obtaining a fecal sample from a patient exhibiting symptoms associated with IBD; (b) performing metagenomic sequencing on the sample; (c) detecting whether strain 1687A6 is present in the sample.

[0025] One embodiment of the present invention provides a method for detecting strain 1687A6 in a fecal sample by: (a) obtaining a fecal sample from a patient exhibiting symptoms associated with IBD; (b) performing RT-PCR on the sample; (c) detecting the amount of strain 1687A6 present in the sample.

[0026] One embodiment of the present invention provides a method for detecting strain 1687A6 in a fecal sample by: (a) obtaining a fecal sample from a patient exhibiting symptoms associated with IBD; (b) contacting the sample with an antibody that binds to strain 1687A6; (c) detecting binding of the antibody with strain 1687A6 in the sample.

[0027] One embodiment of the present invention provides a method for diagnosing IBD in a patient by: (a) obtaining a fecal sample from a patient exhibiting symptoms associated with IBD; (b) contacting the sample with an antibody that binds to strain 1687A6; (c) detecting binding of the antibody with strain 1687A6 in the sample; and (d) predicting the presence or assessing status of IBD when the level of strain 1687A6 in the patient is higher than a predetermined level of strain 1687A6.

[0028] One embodiment of the present invention provides a method for diagnosing IBD in a patient by: (a) obtaining a fecal sample from a patient exhibiting symptoms associated with IBD; (b) detecting the presence of a strain 1687A6 specific nucleotide in the sample; and (c) predicting the presence or assessing status of IBD when the level of at least one strain 1687A6 specific nucleotide in the patient is higher than a predetermined level of the strain 1687A6 specific nucleotide.

[0029] One embodiment of the present invention provides a method of screening for a therapeutic composition useful for treating IBD by: (a) infecting an individual with strain 1687A6; (b) allowing strain 1687A6 to colonize the gut of the individual until the individual exhibits symptoms associated with IBD in that type of individual; (c) treating the individual with a therapeutic composition; and (d) determining whether the therapeutic composition reduces the amount of strain 1687A6 present in the individual below a predetermined level.

[0030] One embodiment of the present invention provides a method of screening for a therapeutic composition useful for treating IBD by: (a) infecting an individual with strain 1687A6; (b) allowing strain 1687A6 to colonize the gut of the individual until the individual exhibits symptoms associated with IBD in that type of individual; (c) treating the individual with a therapeutic composition; and (d) comparing the amount of strain 1687A6 present in the infected individual to the amount of strain 1687A6 in a healthy individual.

[0031] One embodiment of the present invention provides a method of screening for therapeutic compositions useful for treating IBD by: (a) infecting an individual with strain 1687A6; (b) allowing strain 1687A6 to colonize the gut of the individual; (c) assaying the levels of Th17 cells in the GI of the individual; (c) treating the individual with a therapeutic composition; (d) determining whether the therapeutic composition reduces the levels of Th17 cells present in the GI of the individual below a predetermined level.

[0032] One embodiment of the present invention provides a method of screening for a therapeutic composition useful for treating IBD by: (a) infecting an individual with strain 1687A6; (b) allowing strain 1687A6 to colonize the gut of the individual until the individual exhibits symptoms associated with IBD in that type of individual; (c) assaying the levels of Th17 cells in the GI of the individual; (d) treating the individual with a therapeutic composition; and (e) comparing the amount of Th17 cells present in the infected individual to the amount of Th17 cells in a healthy individual.

[0033] One embodiment of the present invention provides a method of screening for a therapeutic composition useful for treating IBD by: (a) administering a therapeutic composition to an animal that serves as a model of IBD and that has strain 1687A6 in its GI and (b) assaying the effect of the therapeutic composition on the levels of strain 1687A6 in the GI of the animal.

[0034] One embodiment of the present invention provides a method of screening for a therapeutic composition useful for treating IBD by: (a) administering a therapeutic composition to an animal that serves as a model of IBD and that has strain 1687A6 in its GI and (b) assaying the effect of the therapeutic composition on the levels of Th17 cells in the GI of the animal.

[0035] One embodiment of the present invention provides a method of screening for a therapeutic composition useful for treating IBD by: (a) administering a therapeutic composition to a patient diagnosed with IBD and (b) assaying the effect of the therapeutic composition on the levels of strain 1687A6 in the gut of the patient; (c) comparing the levels of strain 1687A6 in the treated patient with levels of strain 1687A6 in a healthy individual; and (d) determining whether the therapeutic composition caused levels of strain 1687A6 to reach a predetermined level in the patient.

[0036] One embodiment of the present invention provides a method of screening for a therapeutic composition useful for treating IBD by: (a) administering a therapeutic composition to a patient diagnosed with IBD and (b) assaying the effect of the therapeutic composition on the levels of Th17 cells in the gut of the patient; (c) comparing the levels of Th17 cells in the treated patient with levels of Th17 cells in a healthy individual; and (d) determining whether the therapeutic agent caused levels of Th17 to reach a predetermined level in the patient.

[0037] The present invention includes strain 1687A6 or a physiologically active substance derived from strain 1687A6 that causes the proliferation or accumulation of Th7 cells. Immunity in a living organism can be suppressed or increased through administration of therapeutic compositions that inhibit strain 1687A6 or the physiologically active substances derived from it. These therapeutic compositions can be provided as a pharmaceutical product, probiotic, food, beverage, or other biologically active. Accordingly, the composition of the present invention can be used, for example, to identify compositions for the diagnosis, prevention or treatment of IBD. As a result, it is possible to reduce or inhibit the proliferation or accumulation of Th17 cells in the GI and thereby to improve patient prognosis and outcome using the present invention.

[0038] Similarly, the immune response in a living organism can be increased through administration of therapeutic compositions that contain strain 1687A6 or physiologically active substances derived from strain 1687A6. These therapeutic compositions can be provided as a pharmaceutical product, biological, probiotic, food, beverage, fecal transfer, or other biologically active substance. Accordingly, the composition of the present invention can be used, for example, to stimulate Th17 cell proliferation or accumulation in an organism. It is therefore possible, for example, to administer such a therapeutic composition to treat diseases, enhance the effectiveness of agents used to treat a specific disease, or identify compositions that modulate immune responses in a subject.

[0039] One embodiment of the present invention provides a method for modulating an immune response in a subject by administering a therapeutic composition comprising: (a) the bacterial strain 1687A6; (b) at least one physiologically active substance derived from strain 1687A6; or (c) a complex microbial or fecal sample containing strain 1687A6.

[0040] One embodiment of the present invention provides a method for inducing proliferation or accumulation of Th17 cells in a subject by administering a therapeutic composition comprising: (a) the bacterial strain 1687A6; (b) at least one physiologically active substance derived from strain 1687A6; or (c) a complex microbial or fecal sample containing strain 1687A6.

[0041] One embodiment of the present invention provides a method for identifying a physiologically active substance derived from strain 1687A6 that induces the differentiation, accumulation, or proliferation of Th17 cells in a subject comprising: (a) generating a strain 1687A6 culture; (b) obtaining from the culture bacterial and supernatant extracts, which contain substances present within, secreted by, produced by, or situated on the surface of strain 1687A6 cells; (c) testing whether a particular extract or combination of extracts induces the accumulation of or proliferation of Th17 cells in a subject.

[0042] One embodiment of the present invention provides a method for identifying a physiologically active substance derived from strain 1687A6 that induces Th17 cell proliferation, accumulation, or differentiation comprising: (a) generating a strain 1687A6 culture; (b) obtaining from the culture bacterial and supernatant extracts, which contain substances present within, secreted by, produced by, or situated on the surface of strain 1687A6 cells; (c) contacting a T-Cell population with an extract and determine whether the extract induces the differentiation, accumulation, or proliferation of Th17 cells in the T cell population.

[0043] One embodiment of the present invention provides a method for identifying a physiologically active substance derived from strain 1687A6 that induces Th17 cell proliferation, accumulation, or differentiation comprising: (a) generating a strain 1687A6 culture; (b) obtaining from the culture bacterial and supernatant extracts, which contain substances present within, secreted by, produced by, or situated on the surface of strain 1687A6 cells; (c) contacting a T-Cell population with an extract and determine whether the extract induces the activation of Th17 cell associated genes.

[0044] One embodiment of the present invention provides a method for identifying a physiologically active substance derived from strain 1687A6 that induces Th17 cell proliferation, accumulation, or differentiation in a subject comprising: (a) sequencing the genome of strain 1687A6; (b) comparing the genome of strain 1687A6 with the genome of at least one E. coli strain that does not normally induce Th17 cell proliferation, accumulation, or differentiation; (c) identifying the differences in nucleotide sequences between the two strains; (d) use recombinant technology to express strain 1687A6 specific sequences in an E. coli strain that does not normally induce Th17 cell proliferation, accumulation, or differentiation; and (e) testing whether the recombinant E. coli induces Th17 cell proliferation, accumulation, or differentiation in a subject.

[0045] One embodiment of the present invention provides a therapeutic composition containing strain 1687A6 or at least one physiologically active substance derived from strain 1687A6, wherein the composition comprises a: vaccine; adjuvant; biological; pharmaceutical composition, probiotic; food; beverage; fecal transplant; or a reagent used in an animal model, or a combination of such ingredients.

[0046] One embodiment of the present invention provides a method for enhancing the effectiveness of a therapeutic composition comprising: (a) administering to a patient an active therapeutic agent used for treating a specific disease; and (b) co-administering a therapeutic composition consisting essentially of strain 1687A6 or at least one physiologically active substance derived from strain 1687A6, wherein the co-administration occurs, before, after, or at the same time as the administration of the active therapeutic agent.

[0047] Such active therapeutic agents can include, for example, pharmaceutical agents, corticosteroids, mesalazine, mesalamine, sulfasalazine, sulfasalazine derivatives, immunosuppressive drugs, cyclosporin A, mercaptopurine, azathiopurine, prednisone, methotrexate, antihistamines, glucocorticoids, epinephrine, theophylline, cromolyn sodium, anti-leukotrienes, anti-cholinergic drugs for rhinitis, anti-cholinergic decongestants, mast-cell stabilizers, monoclonal antibodies, vaccines, antibiotics, anti-cancer agents, and combinations thereof.

### BRIEF DESCRIPTION OF THE FIGURES

[0048] FIG. 1 shows the induction of Intestinal Th17 cells in germ-free mice by human fecal microbiotas. Germ free C57B1/6 mice were colonized with human fecal microbiota from 18 different donors. After 5-8 weeks, the proportion of IL-17A⁺ (A,B) and RORγt⁺ (C,D) CD4⁺ T cells in the colon (A,C) and ileum (B,D) lamina propria was measured by flow cytometry. IL-17A⁺ T cells were measured following ex vivo restimulation for 4 hours with PMA and ionomycin in the presence of monensin. Each point represents one mouse and black bars show the arithmetic mean +/− the standard error of the mean for each group of mice. The color of the symbols represents the disease status of the donor (healthy, ulcerative colitis, or Crohn's disease) and the symbol shape represents if the microbiota tested was a total fecal microbiota or a cultured collection of microbes from that donor.

[0049] FIG. 2 Combinatorial gnotobiotics identifies a strain of E. coli that induces colonic Th17 cells and worsens experimental colitis. The figure shows the results of high throughput anaerobic culturing combined with gnotobiotic mouse screening to identify a strain of E. coli that induces colonic Th17 cells and worsens experimental colitis. In pane 2A, the cultured fraction of one donor's microbiota (donor 87 ) recapitulates the Th17 phenotype observed with the total fecal microbiota.

[0050] FIG. 2B Combinatorial gnotobiotics identifies a strain of E. coli that induces colonic Th17 cells and worsens experimental colitis (in pane 2F-H). The figure shows the capacity of 16 isolates from a single donor with Crohn's disease to induce Th17 cells. The 16 isolates from donor 87 were recombined into 8 sub-communities and the capacity of each to induce Th17 cells was tested. The table shows which isolates were included in each sub-community (+). The graph on the right of the table shows the proportion of IL-17A⁺ CD4⁺ T cells in mice colonized with each sub-community. The graph under the table shows the p-value of the association between each microbe and the colon Th17 cells. Data is pooled from two independent experiments.

[0051] FIGS. 2C, 2D show E. coli_A6 is strongly and uniquely associated with colonic IL-17A+ and RORγt+ T cells. Data in C and D is pooled from two independent experiments and each point represents data from one mouse. Data in C and D are not normally distributed. P values are calculated using Mann-Whitney test. FIG. 2C shows the association of a specific isolate (E. coli_A6 ) with colonic IL-17A⁺ cells. FIG. 2D shows the association of a specific isolate (E. coli_A6 ) with colonic RORγt⁺ T cells.

[0052] FIG. 2E Combinatorial gnotobiotics identifies a strain of E. coli that induces colonic Th17 cells and worsens experimental colitis. The figure shows that a community of bacteria isolated from a single donor (donor 87 ) but that lack E. coli A6 fails to induce colonic Th17 cells. It also shows that another strain of E. coli isolated from donor 87 (E. coli E2) is not associated with colonic Th17 cells. A community of all donor 87 isolates but lacking E. coli_A6 fails to induce colonic Th17 cells. Another strain of E. coli isolated from donor 87 (E. coli_E2) is not associated with Th17 cells. Each point represents one mouse and is data pooled from two independent experiments. * p<0.01.

[0053] FIG. 2F, G, H show that mice colonized with E. coli_A6 exhibit more severe intestinal inflammation induced by 2.5% DSS in drinking water. Combinatorial gnotobiotics identifies a strain of E. coli that induces colonic Th17 cells and worsens experimental colitis. FIG. 2F shows that mice colonized with E. coli_A6 exhibit more severe intestinal inflammation induced by 2.5% DSS in drinking water—by mean change in body mass +/− SEM. Representative of two independent experiments with similar results. * p=0.04, ** p=0.0014 at day 7, as calculated by ANOVA with Tukey's correction for multiple comparisons. FIG. 2G shows that mice colonized with E. coli_A6 exhibit more severe intestinal inflammation induced by 2.5% DSS in drinking water—he colon length of individual mice. Pooled from two independent experiments, each point represents the length of the colon of one mouse at day 7 after start of DSS treatment. ** p=0.0014, *** p=0.0007 calculated by ANOVA with Tukey's correction for multiple comparisons. FIG. 2H shows that mice colonized with E. coli_A6 exhibit more severe intestinal inflammation induced by 2.5% DSS in drinking water—by colon histopathology score. Scored by a pathologist blinded to the experimental conditions * p=0.04.

### BRIEF DESCRIPTION OF THE SEQUENCES

[0054] Escherichia coli strain 1687A6 is defined by a 4.9 megabase genome. This genome sequence can be used to track the strain using metagenomics sequencing or cultured isolate sequencing.

### DETAILED DESCRIPTION

[0055] Note that the term “individual” in the present invention is not particularly limited, and examples thereof include humans, mice, rats, cattle, horses, pigs, sheep, monkeys, dogs, and cats.

[0056] The term “therapeutic composition” according to the present invention may be in the form of a vaccine, adjuvant, biological, pharmaceutical composition, probiotic, food, beverage, fecal transplant, complex microbial or fecal sample, a reagent used in an animal model, or a combination of such ingredients. The vaccine, adjuvant, biological, pharmaceutical composition, probiotic, food, beverage, or reagent, or combinatorial product can have the effect of reducing or eliminating strain 1687A6 or of physiologically active substances derived from strain 1687A6 in the GI of a subject. The therapeutic compositions according to the present invention can also have the effect of stimulating or enhancing the differentiation, accumulation, or proliferation of Th17 cells in a subject or of stimulating the immune response in a subject. Administration of such therapeutic compositions may be oral, buccal, parenteral, rectal, or via fecal transplantation.

[0057] The term “IBD” in the present invention includes gastrointestinal disorders such as inflammatory bowel disease (IBD), ulcerative colitis, and Crohn's disease.

[0058] The term “Th17” or “Th17 cells” means CD4⁺ TH17 cells that express the transcription factor RORγt⁺ T, produce the cytokine IL-17, and play a critical role in promoting homeostasis at the mucosal barrier in the gut.

[0059] The phrase “reducing or eliminating differentiation, accumulation, or proliferation of Th17 cells” in the present invention includes an effect of reducing or inhibiting the differentiation of immature T cells into Th17 cells, which differentiation leads to the proliferation or the accumulation of Th17 cells. In addition, the meaning of the “reducing or eliminating differentiation, accumulation, or proliferation of Th17 cells” in the present invention includes in-vivo effects, in vitro effects, and ex vivo effects. Accordingly, all of the following effects are included: reducing or inhibiting in vivo proliferation or accumulation of Th17 cells in the gut through administration or ingestion of a therapeutic composition that inhibits strain 1687A6 or inhibits a physiologically active substance derived from strain 1687A6; reducing or inhibiting proliferation or accumulation of Th17 cells by preventing strain 1687A6 or a physiologically active substance derived from the bacteria to act on the cultured Th17 cells; and reducing or inhibiting proliferation or accumulation of Th17 cells that are collected from a living organism and that are intended to be subsequently reintroduced into that organism or introduced into another organism, by preventing strain 1687A6 or a physiologically active substance derived from the bacteria to act on the Th17 cells.

[0060] The effect of reducing or inhibiting differentiation, proliferation, or accumulation of Th17 cells can be evaluated, for example, by: orally administering strain 1687A6 to an experimental animal such as a germ-free mouse, allowing strain 1687A6 to proliferate in the GI of the animal, administering a therapeutic composition to the animal, isolating CD4-positive cells from the GI, measuring by flow cytometry the ratio of Th17 cells contained in the CD4-positive cells, and comparing the post-administration Th17 ratio to the pre-administration ratio or a predetermined level of Th17 cells.

[0061] One can determine whether the “reducing or eliminating differentiation, accumulation, or proliferation of Th17 cells” is occurring, for example, by assaying the ratio of Th17 cells in the T cell group of the colon, a function of Th17 cells in the colon, or expression of a marker of Th17 cells in the colon, such as RORγt⁺.

[0062] Methods of detecting Th17 cell RNA expression markers include, for example, high throughput RNA screening, northern blotting, dot blotting, and RT-PCR. Examples of methods for detecting protein markers include, for example, ELISA, radioimmunoassay, immunoblotting, immunoprecipitation, and flow cytometry.

[0063] Methods of screening for strain 1687A6 specific nucleotides include, for example, high throughput DNA or RNA screening, Southern blotting, northern blotting, dot blotting, recombinant DNA expression, and RT-PCR. Examples of methods for detecting strain 1687A6 specific protein markers include, for example, ELISA, radioimmunoassay, immunoblotting, and immunoprecipitation.

[0064] The meaning of “physiologically active substance derived from strain 1687A6 and “physiologically active substance derived from the bacteria” of the present invention includes metabolites of the bacteria and substances: contained in the bacteria; secreted by the bacteria; or affixed to the surface of the bacteria. Such a physiologically active substance can be identified by purifying an active component from the bacteria or supernatants of bacterial cultures or from the intestinal tract of a mouse colonized only by strain 1687A6. It can also be identified by screening for strain 1687A6 specific nucleotide sequences that lead to the differentiation, proliferation, or accumulation of Th17 cells in a subject.

[0065] The present invention can provide methods for determining the effects of a therapeutic composition by measuring the absolute amount or the ratio of strain 1687A6 in a microbiota of an individual diagnosed with IBD, treating the individual with a therapeutic composition, and evaluating whether the absolute amount or ratio of strain 1687A6 is reduced in comparison with a base line value obtained by performing a similar evaluation on a healthy individual.

[0066] One embodiment of the present invention provides a method for predicting a patient's response to a therapeutic composition and provide a prognosis. The method comprises measuring the percentage or absolute amounts strain 1687A6 in the microbiota in a subject diagnosed with IBD. Comparing it to a baseline value for those amounts in a healthy subject. Combining the results of the comparison with additional diagnostic information and medical history data related to the patient. Evaluating whether the patient may show a reduction in IBD after administration of a particular therapeutic composition.

### EXAMPLES

[0067] Provided below are select examples of certain embodiments of the present invention; however, the invention is not limited to these examples or the specific embodiments recited above.

[0068] The inventors have identified a single bacterial strain that is a component of human gut microbiotas and that regulates different aspects of intestinal T cell function. To identify this bacterial strain, the inventors colonized germ free mice (which are born and raised under sterile conditions and have no pre-existing microbiota) with human gut microbiotas. The inventors used flow cytometry to study how these microbiotas changed the tone of the T cell response in the gut tissue of the mice.

[0069] Stool samples from inflammatory bowel disease patients and healthy controls were processed under anaerobic conditions. Using a wide range of solid media and culture conditions, a diverse selection of microbes were isolated from each sample and cultured in multiwell formats. Each isolate was identified using a combination of MALDI-TOF mass spectrometry, 16S rRNA and whole-genome sequencing. Microbes were pooled or selectively recombined and introduced to germ-free mice to generate personalized, humanized gnotobiotic mice.

[0070] Microbiotas were obtained from healthy donors and donors with ulcerative colitis (UC) or Crohn's disease (CD). Eighteen (18) different complex fecal microbiotas from each human donor were screened. Of these, microbiotas from two donors, both individuals with Crohn's disease, induced a greater proportion of IL-17A-secreting Th17 cells in the colon and small intestine of mice than all other donors tested. (See FIG. 1.)

[0071] The inventors subjected the complex fecal microbiota of one donor with Crohn's disease (“donor 87”) to high throughput anaerobic culturing and generated a diverse cultured collection of bacteria from this donor. Using 16s rDNA and whole genome sequencing, the inventors identified 16 unique isolates from the microbiota of donor 87 . The inventors subsequently colonized germ-free mice with a pool of the isolates and surprisingly discovered that this culturable fraction of the microbiota from donor 87 recapitulated the elevated Th17 cell response observed with the complex fecal microbiota from the donors. (See FIG. 2A.) At the time of sampling, the Crohn's disease in donor 87 was in remission.

[0072] The inventors recombined the isolates into 8 new sub-communities using an orthogonal screen design. Each sub-community comprised four microbes, with each microbe appearing in two subcommunities. The inventors subsequently colonized groups of germ-free mice with each of the 8 sub-communities and assessed Th17 cell induction in each group. Th17 cells were induced by two of the subcommunities. One strain of Escherichia coli (“E. coli_A6”) featured in both communities and in no other. Linear modeling confirmed that E. coli_A6 was the only isolate that had a significant positive correlation with the proportion of colonic Th17 cells induced. (See FIGS. 2B, 2C, and 2D.)

[0073] The inventors discovered that E. coli_A6 was necessary for Th17 induction by colonizing mice with either the entire cultured collection of microbes, the collection of microbes without E. coli_A6, or the collection of microbes lacking a different strain of E. coli isolated from donor 87 (referred to as E. coli E2). E. coli E2 showed no significant correlation with Th17 cells in the combinatorial screen. In agreement with the screening data, the collection of microbes lacking E. coli_A6 induced a lower proportion of colonic Th17 cells than either the entire cultured collection or the microbe collection lacking E. coli_E2. (See FIG. 2E.)

[0074] The inventors further discovered that the increased proportion of Th17 cells induced by donor 87, and specifically by E. coli_A6, renders mice more susceptible to intestinal inflammation. The inventors colonized germ free mice with either (a) the cultured collection of microbes from donor 87 or (b) the collections lacking either strain of E. coli. The inventors induced intestinal inflammation using dextran sodium sulfate, administered in drinking water. Colitis was less severe in mice lacking E. coli_A6, as measured by reduced weight loss, increased colon length, and less severe histological pathology. (See FIGS. 2F, 2G, and 2H).

The application's sequence listing, which the Patent Office published only in electronic form, follows.

SEQUENCE LISTING (1 sequence)

SEQ ID NO: 1 - DNA, 4913040 bp, Escherichia coli (residues 1-1,637,680 of 4,913,040)
  modified_base (1004902)..(1005000): a, c, t, g, unknown or other
  modified_base (2674793)..(2674889): a, c, t, g, unknown or other
  modified_base (3346738)..(3346746): a, c, t, g, unknown or other
  modified_base (4136806)..(4136812): a, c, t, g, unknown or other
  modified_base (4610591)..(4610688): a, c, t, g, unknown or other
  modified_base (4885427)..(4885828): a, c, t, g, unknown or other
gcgttgagctaaccggtactaatgaaccgtgaggcttaaccttacaacgccgaagctgttttggcggattgagagaagattttcagcctgatacagattaaatcagaacgcagaagcggtctgataaaacagaatttgcctggcggccgtagcgcggtggtcccacctgaccccatgccgaactcagaagtgaaacgccgtagcgccgatggtagtgtggggtctccccatgcgagagtagggaactgccaggcatcaaatttagcgtgctgatatggctcagttggtagagcgcacccttggtaagggtgaggtccccagttcgactctgggtatcagcaccactttttaggttaaagttcggcagattagaaaagaatttgtctggcggcagtagcgcggtggtcccacctgaccccatgccgaactcagaagtgaaacgccgtagcgccgatggtagtgtggggtctccccatgcgagagtagggaactgccagacatcaaataaaacataaggctcagtcggaagactgggccttttgttttatctgttgtttgtcggtgaacactctcccgagtaggacaaatccgccgggagcggatttgaacgttgcgaagcaacggcccggagggtggcgggcaggacgcccgccataaactgccagacatcaaatcaagcgaaaggccatccgaaaggatggcctttttgcttttcgaactaacattcaattaatggattacctgcgataaaaatgccctcgtacgctctgatttaggatgcgcaaaaaattcatcaggtgcagcttgctccactatttccccacgatccataaaaattacccggtcagcgacggttcgtgcaaaccccatctcatgtgttacacacaacattgtcatacccgactgcgccagcccaatcatcgtatccagcacctctttcaccatctcaggatcgagcgccgacgttggctcatcaaacaacataattttcggcttcatacacagcgaacgcgcaatggcaacgcgttgctgctgaccacctgaaatctgtccgggaaacttatgcgcatgttcggcaattctcacccgctctaggtaatgcaccgccagatcttcagcctctttcttaggcatcttgcgtacccaaatcggtgccagggtacagttctgtaaaacggtcagatgagggaagagattgaaatgctgaaagaccattcccacttcctgcctgacgcgctcaatattgcggatatcttcattaagttcgatgccatataccacgatccgtccctgttgatgttcttccagatgattaatacaacgaatggttgtcgatttaccggaacctgaagggccacacagaacgatccgttctcccggttgcacggttaaatttatatttttcaaaacatggaattgtccataccatttattgacgttttccagcgtaatcatcgcgttagcaggttgcagtaaaatttggctcatagtgtcctcaatgcggtgtacgcccggtgttaaaacgtttttccagatactggctatagcgcgacatgctgaaacagaagatccagtagatcagcgcggcgaaaacatacccttccgtcgacatacccaaccaggcgggatcaacggttgcctgctgaacgctactgaaaagatcgaacaacccgataatgatcaccaggctggtatctttgaagagtgcgatgatggtatttaccagcccaggaattaccagcttcaacgcctgtggcagaataaccagcccctgagttttccagtaacccaacgccagcgactctgccgcttcatattgccctttaggcagcgcctgtaatccacctcgcacgacttccgcaacatatgctgactgaaacaggatcacgccaaccagcgcgcggatcaatttgtcgatactggtgccttctgccataaacaacggcagcatgaccgaagacataaacagaacggtaatcagcggcacgccgcgccagaattcgataaaaatgaccgataagatacgcacaatcggcatatgggagcggcgacctaacgccagtaagatcccccacggtagcgcccccgcaatcccaactgatgcaataattaaagttagcgtcagcccgccccattgccgggtttcaacccgctcaagagcaaaaaaaccgccatacatcagccaccagacaatcagtgggtaaatcaccgcccaggccgcaatatagcgaccgcgatgcgggagtattttccagaacattggtgcgatcgacacaagcccaatcagtaatgcgaggttaattcgccagcgttggtcgtgtgggtaaagcccatacataaactgaccaaatcgttcgtggatgaagacccaacaggcaccggcttttgtgcagtcggcacgcgttgagccaacccagttagcctgcaaaaatgcccagttcagcaacggtgggatcagttcccacatcaaccatatgcagccaatagtcagcaggctattgctccagctggagaacagattttttcgcacccacaccatcgcgcggcttgagttatggctcgccgggcgcgggggatgagacagcaatacttttgtcatcatgactccttagcgttcaacgatcgcgatgcggcggttatagatattcatcagcagcgagatagtcaggctgataatcagatagaccgacatggtcatggctatcgtctcgatggcttgccccgtctgattcagcacggtgccggcaaacagcgaaaccatatcgggatagccaatagcggcggcaagagaggagtttttgacgatgttgagatactggctggttaacggtggaataatcacccgcaatgcctggggaataatgacctggcgtagcgtaaccgggttgggtaatcccagtgaccgagccgcttcatgttgaccataaggcactgcctggatcccagcgcggataatctcggcgataaatgcagatgtataaaccgaaagtgccagcgttaaggctgccagttcaggaattaaaaccatcccgccgcggaagttaaagcctcgtagggctgggacatcccagtgtagtgctgcgccaaaaagccattgcgccagtaaaggcaaaccaatgatcaacactgcggcgatcggccaggtgcggcgcagttgtccggtctttatctggtatgttttattaaagcggaatagcccaacagaaaggactatagccataacaacagccaggataaacgcaataaatccgtctcccagctgcggtgacggaatataaagcccacgattgctcaaaaaggccagatcaaacgcgctcacagcctggcgtggtccgggcaaattgcgcaacacggcaaagtaccagaagaagatttgcagcagcgggggaatattacggaagatctcaatataaattgtggaaagctttcgtagcagccagttatccgaaagtctcgccagaccgataaagaagcccaaaacagaagcgaacacaatacacaatgcagaaaccagtagcgtattgagtaagccgacaataaaaacgcgtccgtaggtgtcgccctgctggtaatcgatcaaatgctggacaataccgaagccagcgccgcgatccagaaaggcaaaacctgaagtaatgccacgattattgagattcgttacagtgttgtgaaataaccaaccaacaatgccgacaacagcaacaacggcaaggatctggaataaccaggcgcgaaccgtagggttggcaaaagagagtgagcctttaacggttgagcggcgatgagacatagaaacctcggaaagcataacgctgaagagagcgccgccgtagcgacgctcgttacctcacaccgacttaacgcacgggcggtgcgtactgaataccgccgttattccagagattattttgcccacgtttaattttcagcgggctttctgaacctacgttacgctcaaaaatttccgagtagttacccacctgtttgatgatgttataggcccatttattatccaacttcagatccttgccgtaatcgccttctttacccagcagatgtgccatatcaggcgttgctggattagccgctttttcatcgacgttctgggaattgatgcccatctcttcagcatttagcatggcgaaaagcgtccagcgtacaatcgagaaccattcatcatcgccacgacgaactaccggcccaagcggttctttagagataacctccggtaagacaatccattcagccgggttgcttaatttgatgcgcagggcatacagttgggattgatccgaagccagcgtatcgcagcgaccagattccagtgccttcgctgattcgtcagagcgatcgaaagtcactggtgtgtacttcatattgtttgccttgaaatagtcggcgacgttgagttcggtatcagtacccgcctgaatacagacggtagcgccatccagttctttcgcgctttttagccccgctttatcgtgcgtcaggaagccaatgccgtcgtaataagtgacgccagtaaatgccattcccatcccggcatcgcgagatgaagtccaggtcgtattacgggagagcaaatccacctcccctgactgtaaagcggtgaagcgttcttttgcagtgagcggggtatatttcactttcgtgtcgtcaccaaatacagcagcggcaacaccacgacaaatatcaacatcaatacctgaaaatttaccgtcagcatcggcataagagaacccaggtaatccatcactgatcccgcattgcacaaaaccttttttctgtacggcatcaagcgtcgcgccagcatgcgcctgatttgcaacggcaagcagcacgctggcggcagccagtgtggctatcatcatctttttcataatgcttcctgtgaggcgaaaattatcgttataggacgtttgggaaacgtcttttacctgtctgtggccatcctcttataagcaaaagtagtgccagcttttgcgcacgatttcgcgtcgcaataagctgagtgtagacaggaaataataaaaacagcgccccgcaatggtgcgaaaatgaaacatgcgccacattttggcgcaaaatatttacgcgtgttttactaagcagaataatgattgttagcgtgagtatatttctggtgggaagtgcgaaagttaaattgatgcgttatttcgaaagcagcgaaataacgcgatataacatgctaagtcagcagagaattagccagcagaatatagcaatattttatcttatgtaaagatactgtatcgttaaacagagcgcgaaactccgcgccctgttcagttatttcgacagagcgatgatccccatcgtcaggccagcaacagctgctgctccgccagcaatagccccagccgtttcccagttatcctgagttgtgcctttcatacaggtattggtgtgaaccagacgcccctgatcgtcataaaccggaacgcagggcgaatcgtgagcacagcccgccagcaatgcggtgagcaatgccacaggaattaatcttttcatggtgttacctcagtaataaacgctaacgcttaataagttaactctcttattaacgagctgaatgccattttatcaccggaggttataaatcttgcggaatgaataatgacaaattatgtgaattgtaaaaatagtgaagggagcgggaactatagaaagcttttaaagagtgagcaaaagaatatcttattaatttttatgggtttcactgaaaataataaaggcacccgaaagcgcctttatgtttcagatttatcctttaaagcaacggcggatcaccacaaagaacaccggtacgaagaagattgccagcaacgttgcagagaccattccgcccattaccccgatacccactgcgttctgcgcgccactgccggcaccgttactgatagctagcggtaatacgccgagaataaaggcgagagaggtcatcaggataggacgcagacgcatacgtactgccattagtgtcgcttcaacaacacctttaccctctttctccatgagatctttagcgaactcaacaatcaaaatagcgtttttggccgacaagccaattgtcgttagcaagcccaccataaagtagacgtcatttttttgattaaagagtgttgccgccagtagcacgccgacaatccctaacggcactaccaacataaccgagacaggaattgaccagctttcatagagtgcagcaaggcacaggaaaacaaccacaaaggaaattgctaccagagcgggagcctggtttcccgataagcgttcctgatacgacatacccgtccagtcataaccaatgcccgcaggtaattttgacgcaaggttttccatcaacgccatggcatcgccggaactggttcctggcgcggcttccccctgaatctccattgacggcagaccgttgtagcgttccagtcgcggagagccatacacccaatgtgaagtggtaaaggccgagaatggcaccatttcgccgttggcgctgcggacataaagtttatcgacatcttctggcagcatacggaatttggcatccgcctgaacatacacctttttcacacgaccacggtcgatgaagtcgttaacgtaagtcccacccagcgccgttgaaatggtctgattgatgtcagaaagtgaaacacctaatgcctgcgccttttcctggtcaacttccagtttaaactgcgcggtgtcttccaggccattaggacgcacgctgactaagctggcaggatgttgcgcagccataccaagcaactggttacgggcctgggttagggcatcgtgacccagcccagcctgatcaattaactcaaagtcgaaacccgttgccgtgcccagttcaacaatggctggcatattgaatggaatgacaaaaccgtcgcggatcttgcccaattccattttggcacgatggattaccgcttccgcactgttttcatcaccattacgctcttcccacggtttcagactgacgaaggccataccggcgttttgtgcctggccgctgaagctaaagccgttaaccgtaaagacactttcaacgttcgctttctcgttcttcagatagtaatccgtcacttgatccaacactttttgcgtccgctcttgcgtcgcgccagcgggtaactgaatcatggtcagaaagacaccctgatcctcttcaggtaagaaggaagacggaagacgtaaaaacaacaccaccattcctgcaacaatcagcgcatagatcagtaaatatcgtcctgtggaaccgaggattttgccgacgctgttggtgtagtggttaacgctatgatcgaaggtggtattaaaccagccgaagaaaccgcccttattttcgtgatgctcagcagagacgggtttaagcagcgttgcacataacgcaggggtaagaatcaatgccaccagaacagaaagcgccattgccgaaacgatggtgatagagaactggcgataaattgccccagtagaaccgccgaagaatgccatcggaataaataccgctgacagcaccatcgcgatacccaccagtgcgccctgaatttgcgacattgatttttccgtcgcttcttttggcgggagcttatcctccatcatcacgcgctcgacgttctccaccaccactatcgcatcatcgacgagcagcccgatggcaagcaccatcccgaacatcgttagtgtgttgatggagtaaccaaaagcggcgaggatggcaaacgtccctaacaacaccacgggtaccgcaatggtggggatcagcgttgctcgcatattctgcaagaacagatacatcaccaggaacaccagcataatggcttcgaacagcgtttttaccacttcgtgaatagaaagctggacgaatggcgtggtgtcataagggtagagaaccttcattccctgcgggaagaatggctgtaattccgccagttttgccttaatggctttcgcggtatcgagagcattcgcgccggttgccagcttaatccccaggcccgccgccggttttccgttgatacgagcgataacgttatagttttcaccgccaagttcaacccgtgcgacatctttcaggcgtaccaccgagccgtcactgtttacgcgcagggtcactttgccgaattcttccggattttttaaccgcgtttgagcaataatcgaggcattcaactgttgccctggtaacgctggcgttccgcccaactgtccggcagcgatctgatcgttctgtaccttcaactggttaatcacatcaaccggtgtcagtttatatttgtttagcagatcggcgtccagccagatacgcatcgcatactgtgcgccgaaaagctgtacgtcaccgacgccattcagacggctaagcgtatctttaacgttagaggccacatagtccgagatatcgtcctgtgtggtgtctgggttatcagagacaaagcccgccaccatcaaatagctgctactggacttttcaacactgatcccctgctgctgaacctcctgcggcagcaacggcgtggcgagctggagtttgttctgcacctgcacttgcgcgatatcaggatcggtcccggactggaaggtaagggtaattgtcacgataccggcggaatcgctggtggaggacatatacatcaggttatcgataccattcatattctgttcgataacctgcgtcaccgtatcctgcacggtctgcgcatcagcacctggatagtttgccgaaacagaaaccgcaggcggtgcaatggttggatactgagcgacgggcaattgtaggatcgccagtgcgcccgccatcatcagaataatggccagcacccatgcaaatatcggtcgtcgaataaaaaagtttgccatgtcagattaccttacttcgatgcagtatctgcgggggtatcggtagtggctttaacctgctctcccggacgcgctttttgcaggccgctgacaatgacttgatcgccagatttcagaccttcgctaatcaaccatttatcgccaatcgcctgactggcaacgacagggcgcgcttccacctgacttttatcgttaacaatcagcacggttgcatcaccacgcggtgtgcggctaacgccttgttgcgggataagaatggcgtcaggttggacgccttcatcaatccgtgcacgcacaaacatacccggcaaaagcgtatgttgcgggttagggaagacagcacgtagggttatggagccggtgctttcatcaacggtcacatcagagaattgcagcgtacctttcaggggataggtttgaccgttttccatgaccaactctacgttgctggtggcgttttccttatgcaaatttccttgctctacggattgcttcagcctcataaaatcgttgctggattgggtcacatcaacgtagataggatcgagctgctggacagtcgccagttcagtcgtttgcccattagtgacaagagcgccttcggtcacggtcgatttgccgatacgtccgctaattggcgcagtcactttggtataagcgagattgatgcgagcgctttcgactgtggcttttgcggcaatcacggcggcatcggcctggcgagcatcagcaatggcctggtcgtactcctgctggctgatgtatttcgtacccacgagcggaacgtaacgttttaccgtcaaatgcgcgatggcggcggcggcttcacttttcgccagttcgcctttcgcgctgtcataatttgcctgataggtcgcgggatcgatctggtacagggactggcctgcttgtacatcgctgccttcagtgaaattacgattcagtacgatcccgctaacctgtgggcgaacttcggctatacggtaagcattggtgcggcctggtaattcagtcttaacttctaacggggccgttttcacaatatgaacggtaacctgcggttcaccgacgtgagctttctcttctcccttatcgttacaaccggcgattaaagccgcggagatcagaataaaggagggcaggaggaaaaacctggcatgtttcgtcattactattcctcaaaaaaccaaaagcgcgttatttacccagaaaggcaacgcgttaactcgcagaaagaaaaatacagtttgctatcctacaaattatcattcgtcgatgtaaggaatagttatgaatactggcgtctcaaggcacataaacacaaaaaaagattaatattctactgttttattttgacgcgggttgaaagaggcagaattaaaacctcgtaaattgaaatatatattcatgtggcgaatgtattttaggtaaataatatatattatttatttgacgatttatagcaactcaatgttaccctctcgtataaatacacattagatgatagattaaccttcgctattttctcaccctgtgtcgaatatatttatttcctgaataattaatcatggcaaaaagaaccaaagccgaagctctgaagacccggcaagaactgattgaaactgccatcgcccagtttgcgcaacatggcgtaagcaagacgacgctcaacgacattgccgatgccgctaacgttacgcgtggcgctatctactggcacttcgagaacaagacccaactgtttaatgagatgtggttgcaacagccttcattgcgggagttaatccaggaacacttgacggctggattagagcatgacccgtttcaacaattgcgtgaaaaattgattgtcggcttgcaatatattgccaaaattccccgccagcaggcgttgctgaaaatcttatatcacaaatgtgaatttaatgatgagatgctggccgaggtagtgatacgcgaaaagatgggctttaatccgcagactctccgcgaagtattgcaggcgtgtcagcaacaaggttgtgtagcaaataacctcgatttagatgttgtgatgattattattgatggtgccttcagcggaattgttcaaaactggttaatgaatatggcgggttatgatctttataaacaagcacccgcgctggtcgataacgtattaagaatgttcatgccagatgaaaacataacgaaattaattcatcaaacgaatgaattaagtgtcatgtaaattcacattctgtcctgaaaattcagttcgtcacagttaaccagttttagtggattaactgagttcatattacggcatttgtctgtttctgttgtcagcagttcaatccactgcatcagtaaagtatcaaacagaaaaacgaagacagcgaaaacgacgagccaccaatacttgcgaatcattacctgagcctgtgcatgtttaaccaagtctggcaggaaatatacacgaaatgaataatctgaaaaccaggcttacacttcctttactttgcaatgagatcggggtcaacttcgcttaaccggcttcgttttgacaggttgccggtctttctttttttcactttcgccagttcttccgcagagtaatgcgacgcgacatccagccgtcgaagccccattttgatgtactcgctgttgatctcaataccaatgaattttcgcccgctggagacggctacggcaccggtagtaaagctaccggcaaacgggtcgagaacgatatcgcctgggttggaagaggcgagaataatgcgtttcagtaaggcttccggtttttgcgtcgggtggttctcatattcatccatcaaataacgcacgcgcggaaaatcccagacgttacccggtactttttgatgattgtatggctgtggaggatttttgcgataatcgatcaacgcgcgctgcgatccggttttggcttctaccagaatagcatcaccgttgaatgtgtagttctttgcgtctttcaccatcatcaggatgggttcgtacatggagccgtagtgttttttcgcctgtactccagaactgtcatatgaccagacgatgcgacttttgatggtaaaaagcttgcggcactggagatcgataaagggcatgttttccgtgctgttcatgatgtacatgctgccctgctttttcagaacgcggtggcactctgcaatcacttcaaacagccagtcgataaacagatcttctttccaggcttcgatcagaccatcaaaatttttaccgatgttatatggtgggtcggcaaagatcagatcgacactttcggcggggatctttttaagttcggcaagcgcatcaccgtgaataatggtcttagcttcattaccaaaccgggtcggttcacatcctgttctcatggtcactccctttgtgacacctataaaaaaggcgcttccccatgccgagtagcgcctttttaatcaagcatttagctaacctgaattagttcatgccgtattttttcaattttttacgcagcgtaccacggttgatgcccatcatcagcgcagcacgggtctggttaccacgggtgtattgcatcaccatgtccaacaggggctgttctacttcagccagtaccagctcatagaggtcattcacatcctgaccattcagttgagcaaaatagttcttcagtgcctgtttaaccgagtcacgcaggggtttttgggttacctgatcctgagagttaacggtagaaacggtcagtacgtcagaatttacgcgttgttcgaacatagttctgtcagctctttatttctgtttacgcaaaattttcgaagtatgcctccaacgcctccagctgttcgctggcatcctcaatggcgttgaatgtgcgccgaaactggtcatttggagcgtgttcctggagataccaggaaacgtgtttacgtgcaattcggtacccttttgccggaccataaaagtcatgcagttcccgaacgtgcgcgcaaagcaagcgcttaacctctgccaaaggcagcgggggcagcaactccccagtgtccagataatgctggatttcccgaaagatccagggtcttccctgagctgcgcggcctatcatcagggcatccgcccctgtatagtcgagcacagctctggctttaagcgggtcagtaatgtcgccattcgcgataaccggaatggaaactttctgcttaactgcccgaatactgtcgtactcagcttctccattgaacaaacaggcgcgtgtacggccatgaatggtcagagcctgaatgccacagtcttcagccagttgggcaatctcttcgcagttacggtgttccggtgcccagccggtgcgaatcttcagggtaacaggaacgtccactgcattgacgacctcggtaaggatcgatttaacgacatccgggtactgcaagagggctgaacctgcgagcttgcgattcacttttttagccgggcaacccatattgatatcaataatctgggcaccgctttccacgttaatacgtgctgcatctgccatttctttcggatcgctaccagcaatttgcacggtgcgaataccgggttcatcaatgtgcaccatccgtaaacgagatttgtcgctttcccaaacctgtgggttagaagacatcatctcggatactgtcaatccggctcccatctcgtagcacaacgtccgaaaaggtctgtctgtaatgccagccatgggcgctgcgatcaggcgatttctgagctgatattgtccgatgcgcatgagttaagaaatgaccatactgtgactgcaaggcggcgtatattacgcattttttgcacgagatgaaaggccaaactttgaccaatcctctgagatggatcaaagaattgcatttaaaatgagcgtggtgcgataattactcataaaaatcatcatattagaaaatagtgactaaaatttacactcaaagaaatttgagtaagttctcaatttttctttatgaatgaaaattttggcacgcaaatttgcgtaaataatcggcaaatttacgtgccttttgtgagcttgctcgcacttcgccccgcgtcaccctacggcgatgcgaaggttaattcttacgaccggtaatacggcaccactcttctttttccacgaccgggtccagtgcgaagctatcggcataagcttcacaaacgctctctgcctggcttgccagaataccggaaaggcccagcaaaccgcctgaaaccggcaggacgctgattaacggtgccagttcacgtaatgggcctgcaaggatgttagcgaccaccacgtcggctttcatttcttctggctgatctttcggtaagtagagttccagacggtcagaaacgccattacgttcggcgttatcgcggctggcctgaatcgcctgcggatcgatatcaataccaatggcttttgctgcacccagtttcagcgccgcgatcgccagaatgccggaaccacagccaaagtcgatgactgttttaccggttaaatcgaggctgtcgagccattgcaggcacagagaggtggttggatgggtacccgtaccaaacgccagccctggatctaacatcacgttgacggcgttttcgtccggcacatcacgccagctagggcagatccacagtcgttcaccaaagcgcatcgggtggaaattatccatccattcgcgctcccagtctttatcttctagttgttcgattttatgcgcgaagcctgcgccgagcagcggatggttttccagaatcgccaccacgtcgttcatatcggtttcagcgtcgaacagaccaatcacatcggtgtcgccccacaggcgcgtttcgcccggcagcggctcaaatactggcgtatcgtgggtatcctgaaaagtgatagaaacggcacccgcttccatcagcgcatcgctaagatcttccgcgttcgcgccggtggtgttcagtttcagttggatccaaggcatggcaaaactctttatttatcagtagtcaaaacggtagcttgcgggacggatgtaccgaaacagtttccgaccaggaaagccagcaaacttagtagtaacgagggcacgatagggtggaagcccaggtactgaatattcagcgtcgcgagtacggcatacagcacgccgccaacgatcatcgcacttagcgcgcctttggcgttggcgcgttcccagtaaagacccagcaccagcggccacaggaaaacggcttccagcccaccgaaggccagcaaattcagccagatgatcatttctggcggcttccaggcggcaagcagcagcaacgcgccgagaactaacgtaattaccgccgacatccgcttcagacgcgtctcgttttgcatttgatccggacggatattcagatagagatctttaatgatcgtagcggaactttgcagcagttgggcgttaattgtcgacatgatcgcagccatcggtgcagccaggaagatcccggcggcaaacggtggcagcacttttaccattaacgtcgggatcaccagatccggtacggtgagatcggggatcaccgcccgacctaacgctccggccaggtgcataccgaacatcaggattgcgactacaatcgtaccgatgatgatcccccggtgtactgctttgctgtctttataagagatacagcgcaccgcagtatgcggcaggcctataacgccaaagcacaccagtacccagaacgacgtcataaaggcaggcgacagaatatcgtcagcgccttgtggcgtaaccagttgcggatcgatggtttgcaaggtctgtactgcgttgcttaagccgccagcggcatgtaccacgccaataagcagcacaacggtgccaatcagcatcacaagcccttgcatggtgtcgttcagcacgctggcgcgaaagccaccaaaggcggtatataacgcaatgctgataccaaaaatcagcagcccggtttcataaggaatacccgccgcggtttccagcaggcgcgcaccgccgataaactgcacggtcatcgcaccaacgaacgcaaccagcaaactcaaactcgccagccacaccagaagacgactctggtagcgggcaaacagcatatcgtttagcgtcactgcattgtagcggcgcgcaagaatcgcaaacttcttgccgagaataccgagtgaaagccagactgcaggaagctgaatcatcgccagcaatacccagcccagcccgtatttataagcagctcctggcccgccgataaacgaactggcactgatataggtcgcggtgagcgtcatcgccagcacaataccgcccatagagcggctgccgaggaaatactcattaaggaaggtgccggtgctccgtttacgcatcgcataaaccgagataccgaacaccaccaccagataggcgaccagcggtagaattacttcaagctgcatcgtcatcctccagtgggatatcgcgatagataaatttcaccatcgcccagcacagtccaataaacagcagcggcgtcaggatgcaggccatctcaaaccagcgcggaaagccggtaaaaccgggggcaacgccagataagtaagcggctactaaccaaactgccagatacaaaagggtcagccccagcgcccagcgcgcctctttatgggcctgaacaaaacgagtgtccattttttgtccctgatgggtgaagaaagcggggattgtaccttatgggggttgtcgatccccagtaataaaaaaggccggaaaatccggccttttgacgctttagcagtcttatttttcctgaagaccgagttttttctccagatagtggatgttagtgccaccatgctggaagttctcgtcattcatgatgcggatctgcagatcaacgttggttttgataccgtcgatgatcagctcctgcagcgcattcttcatgcgggcaatcgccacgtcacggttttcaccgtagcaaatcagcttaccgatcattgagtcatagtacggcggtacggtgtagcccgcgtagatatgagactcccaacgtacgccaaaaccgccaggtgcgtggaaacgggtgattttgcccggacttggcaggaaggtgttcggatcttcggcgttgatacgacattccaccgcatggccgcgaacgtgaacttcttcttgcttgatcgacagcggttgaccggcagcgatacgcagctgttctttgatcaggtcaacgccggtgatcatttctgtaaccgggtgttctacctgaatacgggtgttcatttcgatgaaatagaactcgccgttttcgaacaggaactcgaaagtacctgcaccgcgatagccgatatcaacacacgctttagcgcaacgttcgccgatgtagcgacgcagttccggggtaatgcccggtgctggcgcttcttcgaccactttctggtggcggcgttgcatggagcagtcacgttccgccagatagatagcgttgccctgaccgtcagccagtacctgaatctcgacgtggcgaggattttccaggtatttctccatgtaaaccatatcgttgctgaaagcagctttcgcttccgcacgggtcatggagatggattgtgccagttcagcgtcgccgcgcactacgcgcataccgcgaccgccgccgccgccggaggctttgataatcaccggataaccaatgcgtttagcaatggcacggtttttatccatatcgtcgcccagcgggccgtcagaacccggtacgcaagggacgcccgcttttttcatcgccgcgattgcggatactttgtcgcccatcaggcgaatggtttctgctttcgggccaatgaagataaagccggagcgttcaacctgctcggcaaagttggcgttctcggagaggaagccgtaacccggatggattgctactgcgccggtgatttcagcggcgctgatgattgccgggatgttcagataactttttactgacggagcagggccaatacagaccgtttcatctgccagtaatacgtgttttagatcgcgatccgcgctggagtgcacagcgacagtcttgatgcccagttctttacaggcacgaagaatacgcaatgcaatctcgccgcggttggcaataacaattttatccagcatgttcgcctcgttactcgatgacgaccagcggctcgtcaaattctaccggttgtccactttcgaccagaattgctttcacggtaccggatttgtccgcttcgatctggttcatcattttcatggcttcaacgatgcacagggtatcgcccacgttgactttctgacccacttcgatgaacgcttttgcgtccgggcttggggtgcggtagaaagtaccaaccatcggggaacgtacgatgtgaccactgatttccgctgctgctggcgcttccatggaaggaacggtcgccggagcggctgcgttagattgagctggctgctgcatcattggtgcagcgtaagcttgttgcatcacagggaaacttgcggcaggagctgcacggctaatgcgtactgactcttcgccttcagaaatttccagttcggagatgcctgattcttcaaccagctcgatcagttttttaatcttacgaatatccatgagtgggttccgtactctttgtttagtgtgattgtgacaggcgtttcaccgccgtctgtaaagcgtatgccccaacagctgtatgcatagcgataaattccagcaggccgggacgccggtctattttgccccagagtgtcaatgttagacttgacggacattgtgcagcgatctgctgctatcctccggcaaaaaacaaaatataccttcgttgcgccaatgtcaccttttccgcagcgcaaaaactgcgtcagggaggacgaggtcgcacattataacgatttcgtagcaattggcagctaaatactggtcttatcagggaagataatcaacagctaacatgtaaataaccttcaacaccgtgtaatttgcaacaagccgcacaattcacgaaattagcgccatcatcgacggaacttcttataacgtaaggtgaaaagctgaaaagccagccctgcgaagatgaggggctgcaatgagataatcttcacagaccacaaataatgtagggatgccaggatcgcgacaagatagacgacattacgcagcggttgctggggattacccaattttcactgcatcgtctggatagatgtgaatgctaaagcacgcaaaattaaccgattgacaatgctcagcattaaataggttcgagtgattaatttgtagtcaaacaaaatcagattattcaccccatggtaccagaaataagtaaggggctaagcgtagcgtcgcccaggcaaagcaccataaacctaacaggcgacggaggcgtatcaataatagctgtttagtggagtatcaatgcgcatcaatttgtggtcagtcgaaatcatgactttccagtttggatgatgttgtataacttcctgaccaaggtgttcgacgaaagctgtccggctaaccgcttttcccgttaaccgattgaataatgatttcaaaatgagttccctctcttattattccctgctaaatggttagttaaccttcaccagcgtgcgaccctggatctggttattaatgatggcctcggcaaagttcggtgcctctgacagagatatctcttttgccgcctgggtatagaatgattccggtaaatcggcgaccagtcgctgccaggcttgtgcgcggcgttctggtggcgtcattactgaatccaccccttgcaaacggacattacgcagaataaatggcatgaccgtggttggcagagtaaaaccacccgccagaccacaggccgccacgcagccgccgtaattcatttgcgccagcacttttgccagcactttgtcgccaacggtgtcaattgccccagcccagacttgtttttccagaggacgggattcggcaaactcatcacgagggagaacacggctagcacctaaacttttcagatattcatgggtactttcgcgaccggaaacggcaacgacctgataacccaacttatgcagcagcgccacggcggtactgccgacgccaccactggcacccgtcacgacaatctccccgtcctgcgggcgaacaccggcatcttccagcgccatcacacacagcatggcggtaaaaccggcagtaccgataatcattgctttacgcgcgtccagcccttgcggcatggcaaccagccagtcacctttcactcgcgcctgctccgccagcccaccccagtggttttcaccaacgccccagccagtgagtaacacctcctgaccggcatgaaaacgcggatcttcgctggtgcgtacagttccggcaaaatcgatcccaggaatcatcggaaaattacggatgatttttcccttaccggtaatcgccagcgcatctttatagttcaggctcgaccagtgaacatcgaccgtgacatcgccctccggcaggcgactttcgtccagagtctgtactgatgcgagagttttgccgtcctgctgttctaaaagtaacgcctgcataagtggtcctcatgtgcatgatggattggaaaataatttctgaagactatactcgctaatggaaaagcaaagccgatgaagcgcaataaattgcgagataaatctgatttgctagtatgcccgcttcctcactatcggagttaacacaaggatgagattaacgacgaaattttcggcctttgttacgctgctcaccgggttaacaatttttgtgactttgctgggctgttcgctaagtttctacaacgccattcagtataagtttagtcatcgcgttcaggcggtggcgacggcgattgatacccaccttgtgtcgaatgacttcagcgtattaaggccacaaattaccgaattaatgatgtcggcagatatcgttcgtgtagacctgctccatggtgataaacaggtttataccctggccagaaatggtagttatcgtccagttggctccagcgatctgtttcgcgaactgagcgttccgttgataaagcatccggggatgtcgttgcgtctggtttatcaggatccgatgggcaactatttccattcgttgatgaccaccgcgccgctcacgggggcgattggctttatcattgttatgctcttcctggcggtacgctggttacaacggcaacttgccgggcaagaattgctggaaacccgggctactcgtatcttaaacggtgagcgtggctctaatgtgttgggaaccatctatgaatggccgcccagaaccagcagtgcgctggatacgctgcttcgtgaaattcagaacgcacgcgaacaacacagccgtcttgatacgctgatccgctcttatgccgcccaggacgtgaaaaccggcctcaataaccgactctttttcgataatcagttagcaacgttactggaagatcaggagaaagtaggtacccacgggatcgtgatgatgattcgtctgccggatttcaatatgttgagcgatacctgggggcacagccaggttgaagaacagttcttcactctgacgaatctgctgtcgacatttatgatgcgctaccctggcgcactgctggcgcgttaccaccgcagtgattttgctgcgctgttaccgcaccggacgttaaaagaggcagagagcatcgccggtcagttaatcaaagccgttgataccttgccgaacaataaaatgctcgatcgcgacgatatgatccacattggtatctgcgcctggcgtagtggtcaggataccgagcaggtaatggaacatgcagagtctgccacgcgtaatgcgggattgcagggcggcaatagctgggctatttacgatgactcgttgcctgaaaaaggacgcggtaatgttcgctggcgtacgcttatcgagcaaatgctcagtcgcggcggcccgcgcctttatcaaaaaccggcggttactcgcgaaggtcaggttcatcatcgcgaactcatgtgccgcatcttcgatggtaatgaagaggttagctcggcggagtatatgccgatggtcttgcagtttggcttatcggaagagtatgaccgtctgcaaatcagccgtcttattccactattgcgttactggccagaggaaaatctggcgattcaggttaccgttgagtcgctgattcgcccgcgttttcagcgttggctgcgcgatacgttaatgcaatgtgaaaaatcacaacgaaaacgcataattattgaacttgcagaggccgatgtaggtcaacatatcagtcgtttacaacctgttattcgtttagtgaatgctttaggggtacgggtagccgtcaaccaggctggtttgacgctggtaagtaccagttggatcaaagaacttaatgttgagttactcaagctccatccggggctggtcagaaacattgagaagcgaacggagaaccagctgctggttcaaagcctggtggaagcctgctccgggaccagcacccaggtttacgccaccggcgtgcgttcgcgaagcgagtggcagaccctgattcagcgcggtgttacaggcgggcaaggggattttttcgcgtcctcacagccacttgatactaacgtgaaaaaatattcacaaagatactcggtttaacctgccgtttaatccgttttcacgtagaataacgcgcgctgcgtctcatgggagtgtgcttgtctgctcgccagattgttgcagcacatatgcagatgaatgaccttacgcggttgcaaacaggcgaggaatgctgctgatgcattaagcctttctggactcaggcagagatttgtaacaaaggaaacgaactgcactaattttcaccgtagcagatgatttttgcgccttgtcgctgctgcgtgtggttggtaaagtaagcggattttcttttccgccccagctttcaggattatcccttagtatgttgaaaaaatttcgtggcatgttttccaatgacttgtccattgacctgggtactgcgaataccctcatttatgtaaaaggacaaggcatcgtattgaatgagccttccgtggtggccattcgtcaggatcgtgccggttcaccgaaaagcgtagctgcagtaggtcatgacgcgaagcagatgctgggccgtacgccgggcaatattgctgccattcgcccaatgaaagacggcgttatcgccgacttcttcgtgactgaaaaaatgctccagcacttcatcaaacaagtgcacagcaacagctttatgcgtccaagcccgcgcgttctggtttgtgtgccggttggcgcgacccaggttgaacgccgcgcaattcgtgaatccgcgcagggcgctggtgcccgtgaagtcttcctgattgaagaaccgatggctgccgcaattggtgctggcctgccggtttctgaagcgaccggttctatggtggttgatatcggtggtggtaccactgaagttgctgttatctccttgaacggcgtggtttactcctcttctgtgcgcattggtggtgaccgtttcgacgaagctatcatcaactatgtgcgtcgtaattacggttctctgatcggtgaagccaccgcagaacgtatcaagcacgaaatcggttcggcttatccgggcgatgaagtccgtgaaatcgaagttcgtggccgtaacctggcagaaggtgttccacgcggttttaccctgaactccaatgaaatcctcgaagcactgcaggaaccgctgaccggtattgtgagcgcggtaatggttgcactggaacagtgcccgccggaactggcttccgacatctccgagcgcggcatggtgctcaccggtggtggcgcactgctgcgtaaccttgaccgtttgttaatggaagaaaccggcattccagtcgttgttgctgaagacccgctgacctgtgtggcgcgcggtggcggcaaagcgctggaaatgatcgacatgcacggcggcgacctgttcagcgaagagtaatcggatgcaggcaggggaagtgtctgtttaccctgcctggtctgatacgagaatacgcataacttatgaagccaatttttagccgtggcccgtcgctacagattcgccttattctggcggtgctggtggcgctcggcattattattgccgacagccgcctggggacgttcagtcaaatccgtacttatatggataccgccgtcagtcctttctactttgtttccaatgctcctcgtgaattgctggatggcgtatcgcagacgctggcctcgcgtgaccaattagaacttgaaaaccgggcgttacgtcaggaactgttgctgaaaaacagtgaactgctgatgcttggacaatacaaacaggagaacgcgcgtctgcgcgagctgctgggttccccgctgcgtcaggatgagcagaaaatggtgactcaggttatctccacggttaacgatccttatagcgatcaagttgttatcgataaaggtagcgttaatggcgtttatgaaggccagccggtcatcagcgacaaaggtgttgttggtcaggtggtggccgtcgctaaactgaccagtcgcgtgctgctgatttgtgatgcgacccacgcgctgccaatccaggtgctgcgcaacgatatccgcgtaattgcagccggtaacggttgtacggatgatttgcagcttgagcatctgccggcgaatacggatattcgtgttggtgatgtgctggtgacttccggtctgggcggtcgtttcccggaaggctatccggtcgcggttgtctcttccgtaaaactcgatacccagcgcgcttatactgtgattcaggcgcgtccgactgcagggctgcaacgtttgcgttatctgctgctgctgtggggagcagatcgtaacggcgctaacccgatgacgccggaagaggtgcatcgtgttgctaatgaacgtctgatgcagatgatgccgcaggtattgccttcgccagacgcgatggggccaaagttacctgaaccggcaacggggatcgctcagccgactccgcagcaaccggcgacaggaaatgcagctactgcgcctgctgcgccgacacagcctgctgctaatcgctctccacaaagggctacgccgccgcaaagtggtgctcaaccgcctgcgcgtgcgccgggagggcaatagtggcgagctatcgtagccagggacgctgggtaatctggctctctttcctcattgcgctgttgctgcaaatcatgccctggccggataacctgattgttttccggccaaactgggtgttactcatcttgttgtattggatcctggccttgcctcatcgcgtaaatgtgggcacaggttttgtgatgggtgccatactggatctgatcagcggctcgacgcttggcgtacgcgtattggcgatgagcatcattgcttacctggtggcgctgaaataccagcttttccgcaacctcgcattatggcagcaggcgctggtcgtcatgttgctttcgctggtggtggatattattgttttctgggcagagtttttagtgattaacgtctctttcagaccggaagtgttctggagtagtgtagtcaatggggtgctctggccgtggattttcttgctgatgcgcaaagtccgtcagcagtttgcagtgcaataaaggtttctatgacttctctgtatttagcttccggttctccgcgtcgtcaggagttacttgcgcaacttggcgtgacctttgaacgtattgttacgggcattgaggagcagcgtcagccgcaggagagcgcgcagcagtatgttgtgcgtctggcgcgcgagaaagcacgggcaggtgtcgcgcaaacggcgaaggatctcccggtgctgggtgcggatactatcgttatcctgaacggagaagtgctggagaaaccgcgcgacgcagagcatgcggcgcagatgttgcgcaaattatcgggtcagacccatcaggtgatgacagcagtggcgttggccgacagccagcacattctcgattgcctggtggtcaccgatgtgactttcagaacgttaacagacgaagacatcgcgggctatgtcgccagcgatgaaccgttagataaagcaggtgcatacggtattcaggggctgggtggctgttttgtcaggaagataaatggcagctatcacgccgtagtcggcttaccgctggttgaaacgtatgaattattaagtaattttaacgcactgcgtgagaaaagggataaacatgacggctgaattgttagtaaacgtaacgccttcggaaacgcgagtggcgtatattgatggcggtattctgcaggaaattcatattgaacgtgaggcgcgacgcggaatagtaggcaatatctacaagggtcgtgtaagtcgtgtacttccgggtatgcaggcggcttttgtagatattgggctggataaagccgcgtttcttcatgcatccgacatcatgccgcacaccgaatgtgtggcgggtgaagaacaaaagcaattcacggtgcgcgacatctcggaactggttcgtcaggggcaagatctgatggtgcaggtggtgaaagatccgcttggcactaaaggtgcgcgcctgaccaccgatatcacgctcccttctcgctatctggtgtttatgccaggggcttctcacgttggggtttcccaacgtattgaaagcgaatcagaacgtgaacgcctgaaaaaagtggtcgcagagtattgcgacgagcagggcgggtttatcatccgtaccgcagcggaaggggttggcgaggctgaactggcctccgatgccgcttatctgaaacgcgtctggaccaaagttatggagcgtaaaaaacgcccgcagacccgttatcagctgtacggcgaactggcgctggcgcagcgtgttctgcgtgatttcgccgatgccgaactggaccgcattcgcgttgactcacgcctgacttacgaagcgttacttgagttcacctcggagtacattcccgagatgacaagcaagctggagcattacacaggacgccagccgattttcgatctctttgatgtcgaaaacgaaatccagcgagcgctggaacgcaaagtagaactgaaatccggtggttatctcattatcgaccagaccgaagcgatgaccaccgtggacatcaataccggagcgtttgtcggtcatcgcaatctggacgacaccattttcaataccaatattgaagcgacgcaggctatcgctcgccagttacggttgcgtaatctgggcgggattatcattattgatttcatcgatatgaataatgaagatcaccgccgccgagtgctgcactcgctggagcaggcgttgagcaaagaccgggtgaaaaccagcgttaatggtttttcggcgctggggctggtggagatgacgcgtaaacgcacccgcgaaagcattgagcacgtactgtgtaacgaatgcccaacctgccacggtcgcggaacggtgaaaaccgtggaaacggtatgctatgaaatcatgcgcgagattgttcgtgtccaccatgcttacgactccgaccgtttcctggtctatgcttctccggcagtagctgaagccttgaaaggcgaagagtcacactcgctggcggaagtggaaattttcgttggcaaacaggttaaagtacaaattgaaccgctctataaccaggagcagtttgacgtcgtaatgatgtaaacagatgctgggccgccatccggcaaagggtttttgagtcacatttttagcagacaaggagtgacgggtgaggcgattgccggggattttactgcttactggagccgcgctcgttgtgatcgctgccctgctggttagcggcctgcgtattgctttaccgcatcttgacgcctggcgtccggaaatcctcaacaaaatagaatccgcgactggcatgccggtagaagccagtcagctctcagccagctggcagaattttggcccgacgcttgaagcacacgacatccgtgcagaactaaaagatggcggcgaattttcggttaaacgcgttactctggcgctggatgtctggcagagcctgttacatatgcgctggcagtttcgcgacctcactttctggcagctgcgctttcgcaccaacactcctatcaccagcggtggtagtgatgacagtctggaagccagtcacatcagcgatctgtttcttcgtcaatttgaccatttcgatcttcgcgacagtgaagtcagtttcctgacgccatccggtcagcgcgccgagctggcgatcccacaactcacctggctgaacgatccacgtcgacaccgtgcggaaggcctggtaagcctctccagccttaccggacagcacggcgtgatgcaggtgcgcatggatttgcgcgatgatgaggggttgttaagcaatggtcgcgtctggctccaggcggatgacatcgacctgaagccgtggctcggtaaatggatgcaggacaatattgcgctggaaacggcacagttctcccttgaaggctggatgacgatcgacaaaggcgatgtaaccggcggtgacgtctggctgaaacagggcggtgccagctggttgggcgagaagcaaacgcatacgctgtcggtggataatctgaccgcgcatattacgcgtgaaaatccgggctggcagttctctattcccgatacacggatcacgatggacggcaaaccctggccgagcggagcattgacgctggcctggataccggaacaggacgttggcggcaaagacaataaacgcagtgacgaactccggattcgcgccagtaatctggagctggcaggcctggagggcatacgcccgctggccgcgaaactttcacctgcactgggtgatgtttggcgctccacacaaccgagcggcaagattaacactctggcgctggatatcccgcttcaggcggcagacaagacccgttttcaggcatcgtggagcgatctggcctggaagcaatggaaattattaccgggtgcggaacacttctccgggacgctttccggcagcgttgaaaatggtttgcttaccgcgtcgatgaagcaggcaaagatgccttacgaaacggtattccgtgcgccactagaaatcgccgacggccaggcaactataagctggctgaacaataacaaaggtttccagctggatgggcgtaatattgacgttaaagccaaagccgtccatgcgcgcggcggttttcgttacctgcaacctgctaacgatgaaccctggctgggtattctggctggcatcagtaccgatgatggttcacaagcctggcgctatttcccggaaaacttgatgggtaaagacctggttgattacttaagtggcgcgattcagggcggtgaagcggataacgcgacgctggtttatggtggcaatccgcaactcttcccctataaacacaacgaaggtcagtttgaagtgctggtgccgctgcgcaacgcgaagtttgccttccagccggactggcctgcattaactaaccttgatattgaactggactttattaacgacggtttatggatgaaaaccgatggcgttaatctgggcggcgtgcgcgcgagtaatcttaccgcagtgatccctgactactcaaaagaaaaactgctgattgacgctgacattaaaggtccgggtaaagccgttggcccttactttgatgagacaccgctgaaagattctctgggtgcgaccctgcaagaactccagctcgacggcgatgtgaatgctcgcttacatcttgatatcccgctgaacggcgaactggtaaccgcgaaaggtgaagtgacgctgcgtaataacagtctgtttatcaaaccactcgacagcaccctgaaaaatttgagcggtaaattcagctttatcaatagcgatctgcaaagtgaaccactgacagcaagctggtttaatcagccgttgaacgtggatttttccaccaaagaaggggcaaaagcctaccaggtagcggtaaacctcaacggtaactggcaaccggcgaaaaccggcgttctgcctgaagcggtgaacgaagcattgagtggcagcgtggcgtgggatggtaaagtgggcattgatctgccttatcatgctggtgcgacctataacatagagctgaacggcgatctaaagaatgtgagcagtcacttaccttcaccgttagccaaacctgcgggtgaaccactagcggtaaacgttaaggttgatggcaatctcaacagctttgaattaaccggacaggctggtgcggataatcatttcaatagccgctggttgctcggtcaaaagctgacgctcgatcgtgctatttgggcggcagacagtaaaacgctcccgccgttgccggaacaaagtggcgttgaactcaatatgccgccgatgaatggtgccgagtggctggccctgttccagaaaggcgctgcggagagtgtcggtggtgcagcgagtttcccacaacacataacgttacgtacgcctatgttgtcactgggaaatcagcaatggaataacctgagtattgtttcgcaaccgacggcaaatggcaccctggttgaagcgcaagggcgtgaaatcaacgccacgctagcgatgcgtaataacgcgccgtggctggcgaatatcaaatatctttattacaacccgagcgtggcgaaaactcgtggtgattcaacgccgtcatcacctttcccgacaacggagcgcattaacttccgtggctggccggacgcccaaatacgatgcacagagtgctggttctgggggcaaaaattcggtcgcattgacagtgatatcaccatttctggcgatacgttaacgctgaccaatggactgattgatactggtttctcgcggcttactgccgatggtgaatgggttaataatccggggaatgaacgtacctcgctgaaaggaaaactgcgcgggcagaaaattgatgccgccgcagaattttttggtgtcacgacgcccatacgccagtcgtcatttaatgtggattacgatttacactggcgcaaagcaccctggcagccagatgaagcgacgttgaatggcatcattcatactcaactgggtaaaggcgaaattaccgaaatcaataccggacatgccgggcaattgctgcgcttattgagcgtagatgccctgatgcgtaagctgcgttttgatttcagagacacttttggcgaagggttctattttgactccattcgcagcaccgcgtggattaaagacggcgttatgcacaccgacgacacgctggtggatggcctggaggcggatatcgccatgaaagggtcggtaaatctggtacgtcgcgacctgaatatggaagcggttgtcgcaccagagatttctgcgacggtgggcgtggctgcggcttttgcggttaaccccattgttggcgcggcagtgtttgccgccagtaaagtgctggggccgctgtggagcaaagtctccattttgcgctatcacatttcgggtccgctggacgatccgcaaatcaacgaagtgttgcgccaaccgcgtaaagaaaaagcgcaatgatttgacgagggcgcgtaattgccccaatctcataggataatcgttgccaaaggccaacgagccagaacataaccgtaggtcggatagggcgttcacgccgcatccggcagccgttgcctgatgcgacgctgtgcgtcttatcaggcctacaaacggaacataaccgtaggtcggataaggcgtttacgccgcatccgacagccgttgcctgatgcgacgctgtgcgtcttatcaggcctacaaaccggaacataaccgtaggctggatagggcgttcacgccgcatccggcagccgtaaaaaatcctctactgcagtaactaacgagtagcaaaaacgatgagtcttaacctggtaagtgaacaattgctagcggcgaacggcctgaaacatcaggacttgttcgcgatcctcggtcaactggccgaacgtcgccttgattatggcgatctctattttcagtcgagctatcacgaatcctgggttttagaagaccgcattattaaagatggttcttacaacatcgatcagggcgttggtgtgcgtgcaatcagcggtgaaaaaaccggatttgcttacgctgaccaaatcagcctgctggcgctggaacagagtgcgcaagcggcgcgcaccatcgtccgtgatagtggtgatggtaaagtacagacgctgggcgcggtagagcatagcccgttgtatacctcggtagatccgctgcaaagcatgagccgtgaagagaagctggatatcctgcgtcgcgtcgataaggttgcccgcgaagcggacaagcgcgtacaggaagtgactgccagcctcagtggtgtctatgaattaattttggttgcggccaccgacggcacgctagcggcggatgtccgtccgctggtgcgtctttccgtgagcgttctcgtcgaagaagatggcaaacgcgaacgcggtgccagtggcggcggcggtcgttttggttatgaattcttccttgccgatctcgacggcgaagtccgtgcggatgcatgggcaaaagaagcagtgcgtatggcgctggtcaatctttctgccgttgctgcaccagcgggcaccatgccggtagtacttggcgcaggttggccgggcgtgctgttgcatgaagcggttggtcacggtctggaaggcgacttcaaccgccgtggcacttcagtatttagtggacaggtcggggagctggtggcttcagaactgtgtaccgtggttgatgatggcacgatggtcgatcgccgaggttcggtggcgattgatgacgaaggtacgccaggccagtacaacgtgctgattgagaacggcattctgaaaggctacatgcaggataaactcaacgcgcgtttgatggggatgacgccgactggcaacggtcgccgtgaatcctacgcccatctgcccatgccgcgtatgaccaacacctatatgctgccgggtaaatcgaccccgcaggaaattattgaatccgttgagtacggtatctatgcaccgaactttggtggcggtcaggtggatatcacctccggcaaattcgttttctccacttcagaagcatatctgattgaaaacggtaaagtaacgaagccggtgaaaggcgcaacgttgattggttccggtatcgaaaccatgcagcagatttcgatggttggcaacgacctgaaactggataacggcgtgggtgtctgcggtaaagaagggcaaagtttgccggttggcgtgggccagccaacgttgaaagtcgataacctgactgttggaggtactgcgtaataatttcactattttcagaaggataattaatctttctacgtgcacgaacggtcccctcgcccctttggggtgagggttagggtgaggggaacccgttggcacaggtttgtacaacgtaacagtacaatatgaattacttctctttcccgcgcccgtgcatctcctgaaacaatttaccgacctcaacaaaataatccgtcagcgagttgatcacgacctgtaccttcagcggcagcttatctttttcggtatataacgcataaaccgggcgtggatctgactggtaacgcggcagcaggatctccagctccccacgattgatctcgttgatcacccacatcagcggcacgtaggcgatcccggcacccgccgtcagccagcgcaccagcgtcatcggatcattagtcacaaatcttccttgtgggatcaggcgagtcgagatcccttccggtgcgatcagttcaaattcattgtcgggccgcacgctgtattcaagccatgaatgactactcaaatcggcgggtttttccggtatgccgtattgtgtgagatagcttttcgcggcgcacaccaccattggcatcgcgcccagacggcgggaaaacaggctggaatcctgcaacgcgccgacgcggatcaccacatccagaccgtcggcaatcaggtcgggggctggaattccggtaaccagattgacgctcaaacctgggtattctttcagcattttggctgtcagcccggcgagaacattttgtgccatagttgaagaacagccaatgcgtagcgtcccgatgggggtgttattgaaggcatacagttgctcatgaacatcctgcacttcatgaagcatacgacggcagccctggtagtaaattctaccggcttcggtcaggccaatgctgcgtgtgctacggtttaacagctttacctgcaactcatcttccagttttgataccgtctgactgatggacgaaacgctcatctgtagctgtctggcggcggcggtaaaagagccaaattcaactactttggcaaacaccgacatgcgttttagtcgttccattattcactctgacttaaaagtgatttagatcacataatatagataacagcataacagttacgctaatatattaaatatcaatctacagcaatgttgctctcgcccggctttccatgcccttctctgcggcgacagatgctgaaaataataacgcctgctctctctttacaaccaaggtcaacatgagtctgtttcccgttatcgtggtgtttgggctgtccttcccaccgatattttttgaattgcttttatcactggcgattttctggctggtgcgccgggtacttgtgccaacaggtatctacgactttgtctggcatccggcgttgttcaacaccgcgctctattgctgcttgttttatttgatatcgcgactgttcgtttgaggttgaagtgaaaacactaataagaaaattctcccgtacggccatcacggtcgtattagtcattctggccttcatcgcaatttttaatgcctgggtctattacaccgaatccccctggacgcgtgacgcgcgctttagcgctgacgtcgttgcgatcgcgccggacgtttctggactcattacccaggtgaatgttcatgataaccagctggtgaaaaaaggacagatactgttcaccatcgaccagccgcgctatcaaaaggcgcttgaggaagcgcaagccgatgttgcttattatcaggtactggcacaggagaaacgccaggaggccggacgtcgtaaccgtctcggtgtgcaggcgatgtctcgcgaagagatcgaccaggccaacaacgtactacaaacggttctgcatcagttagcgaaagcgcaggcgacccgcgatctggcaaaactggatcttgaacgcacggtgatccgcgcgccagcagatggctgggtgaccaacctcaacgtctataccggtgagtttattactcgaggatcaacggcggttgcgctggtgaaacagaactccttctatgtactggcctatatggaagaaactaagctggaaggggtgcgtccggggtatcgtgcagagatcacgccgcttggcagtaacaaagtgctgaaagggactgttgatagtgttgccgcaggggtcaccaacgccagcagcacgcgtgacgacaaagggatggcgactatagactctaaccttgaatgggtgcgtcttgcgcaacgtgttccggttcgtattcgtctcgacaaccagcaagagaacatctggcctgcgggcaccactgctacagtggtggtcactggcaaacaagatcgcgacgaaagccaggattcgttcttccgtaaaatggcccatcgcctgcgtgagtttggttaatcacgatgggtattttctccattgctaaccaacatattcgctttgcggtaaaactggcgaccgccattgtactggcgctgtttgttggctttcacttccagctggaaacgccacgctgggcggtactgacagcggcgattgttgccgccggtccggcctttgctgcgggaggtgaaccgtattctggcgctattcgctatcgtggctttttgcgcatcatcggcacatttattggctgtattgccggactggtgatcatcattgcgatgatccgcgcaccattattgatgattctggtgtgctgtatctgggccggtttttgtacctggatatcctcgctggtacgaatagaaaactcgtatgcgtgggggctggccggttataccgcgctgatcattgtgatcaccattcagccggaaccattgcttacgccgcagtttgccgtcgaacgttgtagcgagatcgttatcggtattgtgtgtgcgattatggcggatttgctcttttctccgcgatcgatcaaacaagaagtggatcgagagctggaaagtttgctggtcgcgcaatatcaattaatgcaactctgtatcaagcatggcgatggtgaagttgtcgataaagcctggggcgacctggtgcgacgcaccacggcgctacaaggcatgcgcagcaacctgaatatggaatcttcccgctgggcgcgggccaatcgacgtttaaaagcgatcaatacgctatcgctgacgctgattacccaatcctgcgaaacttatcttattcagaatacgcgcccggaattgatcactgatactttccgcgaattttttgacacgccggtagaaaccgcgcaggacgtccacaagcagctcaaacgcctgcggagagttatcgcctggaccggggaacgggaaacgcctgtcaccatttatagctgggtcgcggcggcaacgcgttatcagcttctcaagcgcggcgttatcagtaacacaaaaatcaacgccaccgaagaagagatcctgcaaggcgaaccggaagtaaaagtagagtcagccgaacgtcatcatgcaatggttaacttctggcgaaccacactttcctgcattctgggcacgcttttctggctgtggacgggctggacttccggcagtggtgcaatggtgatgattgcggtagtgacgtcactggcaatgcgtttgccgaatccacgcatggtggcgatcgactttatctacgggacgctggccgcgctgccgttagggctgctctactttttggtgattatccctaatacccaacagagcatgttgctgctgtgcattagcctggcagtgctgggattcttcctcggtatagaagtacagaaacggcgactgggctcgatgggggcactggccagcaccataaatattatcgtgctggataacccgatgactttccatttcagtcagtttctcgacagcgcattagggcaaatcgtcggctgtgtgctcgcgttcaccgttattttgctggtgcgggataaatcgcgcgacaggaccggacgtgtactgcttaatcagtttgtttctgccgctgtttccgcgatgactaccaatgtggcacgtcgtaaagagaaccacctcccggcactttatcagcagctgtttttgctgatgaataagttcccaggggatttgccgaaatttcgcctggcgctgacgatgattatcgcgcaccagcgcctgcgtgatgcaccgatcccggttaacgaggatttatcggcgtttcaccgacaaatgcgccgcacagcagaccatgtgatatctgcccgtagcgatgataaacgtcgtcggtactttggccagttgctggaagaactggaaatctaccaggaaaagctacgcatctggcaagcgccaccgcaggtgacggaaccggtaaatcggctggcggggatgctccataagtatcaacatgcgttgaccgatagttaagtcaaaaccgacgccaaaagcgtcggttttttcatggctatacttagcgatgcacggcagaactcgccgcgaaacgtgacggtggcaacagatgaatatttatacctttgattttgatgagattgagagtcaggaggatttttatcgtgactttagccaaacctttggtctggcgaaagataaggtacgcgatctcgactcactatgggatgtgttaatgaacgatgtcctgccgctaccacttgagattgaatttgttcatctgggagagaaaacgcgtcgccgttttggcgcgttaatattgctgtttgatgaggcagaggaagagctggaagggcatttgcgttttaatgttcgtcattagcgcaaaaaaaagcccccgaaccgggggcaatatcgtcggacaagacgatgagggtttatttgtacagttcagccgtagcgtgccaggtgtcaccgctacgagcttcagtaatctggtaggccgttgcgcctttctcttccgcttttttgttcagcatttcacgcatatccattggcgaagacgccacaccacttacggatacggtcccgattgcttcacgattttgtgcttgtgcagcatcaatggagtcggcagcgaatgcaccgaaagagagaacagaaagtacgcttaatgcagcaacagtggttttgattttcatgatttttacctcgacataatcttttagctgggcctttgtttcgtgacccatatcacaaaatcaagtatacactaattattgagctaattaataccgcgctaactgtttcagttgatactaagtgttaaaaatgtgaattttaataacaaaaaagaattaaaaatacggttatttatcgttaattctagttttttcaattagataatgaattttgcataatgtgctttttttaccttatgtattcattgtgtgaatgacatgtcgcagtaaaacgcactattcgttaaattaatcgcaggggaaagcagggggttgagagggataagcaacattttccccgccgtcagaaacgacggggcagagattaaagctcctggtcgaacagctctaaaatcgcttcgtacaggtctttgactgtgaaaccgttagcaggggtggtaaagatggtgtcatcgccagcgatggtgcccagaataccttctgctttgcccagtgagtccagcaggcgagcaattaactgcgccgcgccagggctggtatgaatcacgacaactgcatcgttgtagtcgatatccagcaccagattcttcaatggactggaggtggttggtacacccagttcagctggcaggcagtaaaccatttccattttggcattgcgtgtacgtacagcaccaaacttggtcaacatccgcgagactttagactgattaatattgtcaaagccttgctcctgcaacgcggcgacgatttcgccctgggagctaaatttctcttctttaagtaatgctttaaatgctttaactagttcttcttgcttagccgagcttcgcataagtcacccgatatggtggttgatacaacattattgtgcatacagatgaatttttatgcaaacagtcagccctgaagaaggctgaaataatgttatgaaagagcgggattttatcaaatttcgttattgagaaacatgcctgcgtcacggcatgcaaattctgcttaaaagtaaattaattgttatcaaattgatgttgttttggctgaacggtagggtatattgtcaccacctgttggaatgttgcgctaatgcataagcgactgttaattacgtaagttaggttcctgattacggcaattaaatgcataaacgctaaacttgcgtgactacacattcttgagatgtggtcattgtaaacggcaattttgtggattaaggtcgcggcagcggagcaacatatcttagtttatcaatataataaggagtttaggatgaaagtcgcagtcctcggcgctgctggcggtattggccaggcgcttgcactactgttaaaaacccaactgccttcaggttcagaactctctctgtatgatatcgctccagtgactcccggtgtggctgtcgatctgagccatatccctactgctgtgaaaatcaaaggtttttctggtgaagatgcgactccggcgctggaaggcgcagatgtcgttcttatctctgcaggcgtagcgcgtaaaccgggtatggatcgttccgacctgtttaacgttaacgccggcatcgtgaaaaacctggtacagcaagttgcgaaaacctgcccgaaagcgtgcattggtattatcactaacccggttaacaccacagttgcaattgctgctgaagtgctgaaaaaagccggtgtttatgacaaaaacaaactgttcggcgttaccacgctggatatcattcgttccaacacctttgttgcggaactgaaaggcaaacagccaggcgaagttgaagtgccggttattggcggtcactctggtgttaccattctgccgctgctgtcacaggttcctggcgttagttttaccgagcaggaagtggctgatctgaccaaacgcatccagaacgcgggtactgaagtggttgaagcgaaggccggtggcgggtctgcaaccctgtctatgggccaggcagctgcacgttttggtctgtctctggttcgtgcactgcagggcgaacaaggcgttgtcgaatgtgcctacgttgaaggcgacggtcagtacgcccgtttcttctctcaaccgctgctgctgggtaaaaacggcgtggaagagcgtaaatctatcggtaccctgagcgcatttgaacagaacgcgctggaaggtatgctggatacgctgaagaaagatatcgccctgggcgaagagttcgttaataagtaattgattagcggataataaaaaaccggagcacagactccggttttttgttttgagcgcacgacttaattggttgccggatattcctgaatggtgacctgcagcgttaactgcttatcatcacgcatcactactacagggatcaccgaaccagggcgaatttccgccacctgatccatcgtctccagagcagagatggccggtttgttatccaccgaaataatcagatcgttgacctgaatacccgcattcgccgccgggccgtcaggtgacacttcattaaccacgatcccttgcagttgatctataccaccgccctgcgcgtgcagtggtgcgatctcacgtccgccgataccaatgtagccgcggatcacgcgaccatcgcggatcagcttatccataattttggttgctaactggaaaggaatcgcaaagccgataccttccggcgtttcgccatcgttactcttatcaaacgacagcgtattaatgcccatcagttcgcccagcgagttcaccagcgcgccgccagagttaccatggttaatggaagcatcggtttggaggaagttttgccgcccggtcgggttcagaccgattcgacccgtggcactaataatcccctgggtaatggtctgcccgaggttgtacgggttaccgatcgccagtactacgtcgccaatgtgcggtacgcgacgtgcattaattggaatggtaggtaaaccgccagtggcattaattttaagtaccgccagatcggttagagagtcagatcccaccagcaatgcttcaaatacacgtccatcctgtaaggcgacgatgatctgatcggcgtcgttgatgacgtgtttattggtgatgatataaccgcgttgatccatgattacaccggatcccagggtgcggatctcaagctggttgtgagagttggtgttcaaaccacggttgtaaacgttaaccaccgctggcgcggcgcggcgaaccgccagattatagctggcaggcgtctcatcggtactgtcaaattgcggagtggaaagcgggttaaggctgcgcagcgaaggcatggcaaccagcagaatagcgccgacaattaatccaatcgcaacggaacgtaagagcttcacaaacatgatggaggcgtcattaaaaaagggaacggcagcagcataccacgagttaaccggacatcacacgtaagcctgatgcccggtttacgacattaacgcatcagcagatagatgctttcattgccgcgtacaatttgcagggcgatgatggccggttttgccgccagcactttacgcatttcagcaatcgagttcacccgatcgcggttgacgccaatgatcacatcgtctttttgcaagccagcctgagcagctgggcttcctttgacaacttcatcgattttaatacctttgccgccatcttttagctgaccatcgctcaacgttgcaccttccagcgctggcgtgatcatttcagcgctggccgacgaagaggtgctggtatcgagcgtcacttctacttccagtggtttgccgttacgcagcaggccaagcttcactttcgtgcccggctcggtggtcgcgatacgagagcgcaactcagcaaagctattcagcggtttgccgttgaggctggtaataatatcgcccgctttgacgcccgcttttgccgagccagaacctggcaacacttcgctgacaaacgcgccacgctgcacgtcaaggttgaaggctttggcgatatcggcactcatctcggtgcctttgatgcctaacaaaccgcgtttgatttcaccaaagtcgataagctgctgcgccagtgttcgcgccatattactggggatggcaaatccaatcccgacgctcccgccgccaggcgcaaggattgcagtgttgatgccaattaactcaccgttaaggtttaatagtgcaccgccggagttaccgcggttaatggaagcatctgtctggataaagttttccagaccttcaagattcaacccgctgcggcctaatgcggaaacaatgccagaggtggcggtttgcccaaggccaaatgggttaccgaccgctacggcaaaatcaccgacgcgcaatttatcggagtcggcaatagcgatttgcgttaatttgctcgggttttgaatttgtaacagggcgatatcgctctggtcatcgctaccaatcagttttgcatcaaactcgcgcccatcattgagctgaatactgattttctgtgcctgattaatcacatggttgttggtcagcacatagcctttactggcgttgatgatgacaccggagcctaaaccttcgaagggttgtgcaggttgatccggtaaatcatcaccaaaaaactttttgaattcttccgggattttctgtccctgactggccgttccttccacccgtacgctcaccactgccggaagcactttttccagcattggagccagactggggagaggggcctgatcggcaacctggcctggaatcgacgcgacggcctgaaatgacgccgagagagttaacccgacacttaacgctaatgcactcaacagctgggtttgttttttcattattcctgctctcgtacctgaatgataagaaaagagattcaaaacagtttgatgttattgaattttcagacggctaacaatgagacaccagattaaatgatagtcggggagggagagaagaggagggcgcaatggctgcgcccgaaaaataaattagtcgcgcttcgcgccagtacgcagcaggccggatgcgccttcagaatagtcgcgaggcatctgcaccggtgcctgatcgttgctggcttcagactctgccagacgattacggaacgggtttgcttcagcagacagttccggcagcaggctgctggagctttttgccatgtgctgatacagctggcgatagtcgtgcgccatggtatccagtaattccgcgctgcgggcaaagtggctaaccagctcttcgcgatactcgtccagttcagctttattcttttccagttcgtactgcaacgcctgttgctggcgtagtttacgattaccaaaacgcatggccacagcaccaataatgatgccgacgactaacccaattagcgcatattcccaggtcatgaacatctcccgttgtcttttgtttccgtagggtgttggcttcaggctccatgcctgcggctgattatgccactataaccgttaattccacagaagtggaatcccgactgcatatcgcgtagtgtagaacggcctttttttcgtcaaccgtgaacaacggcgcaccgattattcaaggaataacaataagatcatgcaaagcgttaccccaacatcgcaatacctgaaggcgcttaatgaaggcagccatcaacccgacgacgttcaaaaagaggccgtcagccgcctggaaattatttatcaggaactcatcaatagcacgccaccagcccccaggacgagtgggctaatggcgcgggtcggtaagctgtggggtaaacgcgaagacacaaagcatacgccagtgcgtggcttatatatgtggggcggtgtaggacgcgggaaaacctggctgatggaccttttctatcaaagcctgccgggagagcggaaacagcgcctgcactttcaccgttttatgctgcgggtgcatgaagagctaactgccttacaggggcagaccgatccgctggaaattattgccgatcgctttaaagccgaaactgacgtgctctgttttgacgaattttttgtttctgatattaccgatgccatgctacttggcggtctgatgaaagccctgttcgctcgcggtattaccctggtagcgacgtcaaatattccgccggatgaactttatcgaaatggcctgcaacgtgcgcgttttctgcctgcaatcgatgccattaaacagcattgtgatgtaatgaacgtggacgctggtgttgattatcgtctgcgtacactcactcaggcgcatctgtggctttcgccacttcacgatgaaacccgggcgcaaatggataaactatggttggcgctggcgggggggaaacgagaaaattcaccgacgttagaaatcaaccatcggccattagcaacaatgggcgtcgagaaccagacgctggcggtctcttttactacgctgtgcgtcgacgcccgcagtcagcatgactatattgcgctctcacgtctctttcatacggtcatgttgtttgatgtaccagttatgacgcggttgatggagagcgaagcgcggcgctttattgcgctggtggatgagttttacgagcgccatgtcaaattagtggtgagtgcagaagtgccgctgtatgaaatttatcagggcgatcggctgaagtttgagttccagcgttgcctgtcacgtctgcaagagatgcaaagcgaagagtatctgaagcgcgagcatttggcgggttaaaacctgtcacaaatcacaaaaaggggtcgatctttgaccccgacttctctataatcctgcgaccccacgttacaagaaagtttttttcccaaaactttttgtgtgctggcataggctattcgaaggggtaggtttgccggactttgtcgtgtgaacctcaacaattgaagacgtttgggtgttcaccaacgtgtaactatttattgggtaagcttttaatgaaaacttttacagctaaaccagaaaccgtaaaacgcgactggtatgttgttgacgcgaccggtaaaactctgggccgtctggctactgaactggctcgtcgcctgcgcggtaagcacaaagcggaatacactccgcacgtagataccggtgattacatcatcgttctgaacgctgacaaagttgctgtaaccggcaacaagcgtactgacaaagtgtactatcaccacaccggccacatcggtggtatcaaacaagcgacctttgaagagatgattgctcgccgtcctgagcgtgtgattgaaatcgcggttaaaggcatgttgccaaaaggcccgctgggtcgtgctatgttccgtaaactgaaagtttacgcgggtaacgagcacaaccacgcggcacagcaaccgcaagttcttgacatctaatcgggattataggcaatggctgaaaatcaatactacggcactggtcgccgcaaaagttccgcagctcgcgttttcatcaaaccgggcaacggtaaaatcgtaatcaaccaacgttctctggaacagtacttcggtcgtgaaactgcccgcatggtagttcgtcagccgctggaactggtcgacatggttgagaaactggacctgtacatcaccgttaaaggtggtggtatctctggtcaggctggtgcgatccgtcacggtatcacccgcgctctgatggaatacgacgagtccctgcgttctgaactgcgtaaagctggcttcgttactcgtgacgctcgtcaggttgaacgtaagaaagtcggtctgcgtaaagcacgtcgtcgtccgcagttctccaaacgttaattggcttctgctccggcagaaaacaattttcgaaaaaacccgcttcggcgggtttttttatagctaaaatctgaatcagcgtaaaaactggaaagttgctttttgctgccacctgacagacaggtaaaacaaaaaccacatcgccaataagggactaagtcaactatttcagactaaagcgcatctctttttccccatttccggcatcgactcaccacaatggtcgcaaaatctggtaaactatcatccaattttctgcccaaatgtcgggtattgctcattttttgtttgattttcgaacaaagagagtcgttccttattgggtaacacaacttctgactggccacctggtggctggtagcagtaaaaattctgactatacctggaggttttcatggctgtcgctgccaacaaacgttcggtaatgacgctgttttccggtcctactgacatctatagccatcaggtccgcattgtgctggctgagaaaggtgtaagtttcgagatcgaacacgtggaaaaggacaatccgcctcaggatctgattgacctcaacccgaatcagagcgttccgaccctggtggatcgtgagctgaccctgtgggaatctcgcatcattatggaatatctggatgagcgtttcccgcatccgccactgatgcctgtttacccggtagctcgcggtgaaagccgtctgtacatgcatcgcatcgaaaaagactggtacacgctgatgaacaccatcatcaacggttcagcttctgaagcagatgccgcacgtaagcaactgcgcgaagaactgctggcgattgcgccggtcttcggtcagaagccgtacttcctgagcgatgagttcagcctggtcgattgctatcttgctccgctgctgtggcgtctgccgcaactgggcatcgagttcagcggcccgggtgcgaaagagctgaaaggctatatgacccgcgtctttgagcgtgactctttccttgcttctttaactgaagcagaacgtgaaatgcgtctgggccggagttaatctgtatggatttgtcacagctaacaccacgtcgtccctatctgctgcgtgcattctatgagtggttgctggataaccagctcacgccgcacctggtggtggatgtgacgctccctggcgtgcaggttcctatggaatatgcgcgtgacgggcaaatcgtactcaacattgcgccgcgtgctgtcggcaatctggaactggcgaatgatgaggtgcgctttaacgcgcgctttggtggcattccgcgtcaggtttctgtgccgctggctgccgtgctggctatctacgcccgtgaaaatggcgcaggcacgatgtttgagcctgaagctgcctacgatgaagataccagcatcatgaatgatgaagaggcatcggcagacaacgaaaccgttatgtcggttattgatggcgacaagccagatcacgatgatgacactcatcctgacgatgaacctccgcagccaccacgcggtggtcgaccggcattacgcgttgtgaagtaatacaaaacaggcccaggcggcctgttttgtctttttaatgacttaataaaatagcgtgattgtggcaatcatattcaccacgaaaccgactgccatggggatcgctgtccgcttcaccaccgcaaaaggcgaaacgcctgcaattcctgacgtaacgaccaccaccgcagtaatcggcgaaaccgcgcgcgctagcgtcgtggcaaaatgcatcggcataatcattacaaccgctggtacatgtagtccggctgcgatattcggaataagactggcaaatgacataaacggcgcattgccagagcccatcacaatggcacaaatggcaatgaccagcgccataataatcatcacgccaataccgcccagaccagaatgctccgcccccctgataaccgcatcgacagtgccaatcgtcgttaagcctttcgcaaatatttcacccgcgaccaccagcgttaccacgttggcaaactgcgtacccatgccgtcaaaaaacgcctgcacatcgtccattgtttcgcgcaagttatgcttgcggaagaactcaacaaacatcgtcacagtcaaactcagtaacatcaccaccaccagatgcagttctgactgcatcagcccgacgtgggcgaggaacagcgagccgagcatcaggattaacggcatcacaggtaaaatggcgtaatagagcggcgggacattatcgagagctttttgctctgcctgttcgtgattgatatttttatcttttttgtcaaaagcgcgttgcacgaaaaagtgggagatcgccaccgagataatgacgcaagaggcgaccggaagctggtagtggaagaagtatgtggcaattttcattcccgctacctgggcagcaaaaatggagttcgtttccagaatcccccactcaatggacatcgtggttgcgataactgccaccgcagagagacgacttactcccagactcaccagcgtcggaaataaggtgaccatcagcaacatacccagaccggaggcgctggtaataaactgcgccatgatttggccgatgacgtaagttgccgacagaataatatacggcgagcgaatgagttttaacgggcggcttaacaagctcaccatcgcgcgactggcccctatgcgctccatgtagcgggcataaccgcccaccgccataatcgacagccccaatccggcaatgcggttggacagcatgcgcaggatttcattataaatatcgacgatcaagtagccgctgcttttggtgggatcgagtacaccaccgaaccctaaccagacaccgcacatcatcaggaagatacctgcggcagccagcaccacctgaggtttgtagtttttcaggatcaaatagcccatcgtaattaatacgatgacagatataattatgccgaacattgttgaactccgtgtcaaaagaaaacggtcaatcccataaacggcagattgaaaacaacgatgttatattttttgcaaggctatttatggtgcggatgtcgtgtttttaattgtaggtgaggtgatttttcattaaaaaatatgcgcttatgattattttgtaagaacacattcataatattcataatgctcgtgaatagtcttataaataattcaaacgggatgtttttatctgcgttacattaatttttcgcaatagttaattattccgttaattatggtaatgatgaggcacaaagagaaaaccctgccattttcccctactttcaatcctgtgataggatgtcactgatgatgttaatcacactgaccttacagaatgggccttatgaacgcatttgattcgcaaaccgaagattcttcacctgcaattggtcgcaacttgcgtagccgcccgctggcgcgtaaaaaactctccgaaatggtggaagaagagctggaacagatgatccgccgtcgtgaatttggcgaaggtgaacaattaccgtctgaacgcgaactgatggcgttctttaacgtcgggcgtccttcggtgcgtgaagcgctggcagcgttaaaacgcaaaggtctggtgcaaataaacaacggcgaacgcgctcgcgtctcgcgtccttctgcggacactatcatcggtgagctttccggcatggcgaaagatttcctttctcatcccggtgggattgcccatttcgaacaattacgtctgttctttgaatccagtctggtgcgctatgcggctgaacatgccaccgatgagcaaatcgatttgctggcaaaagcactggaaatcaacagtcagtcgctggataacaacgcggcattcattcgttcagacgttgatttccaccgcgtgctggcggagatccccggtaacccaatcttcatggcgatccacgttgccctgctcgactggcttattgccgcacgcccaacggttaccgatcaggcactgcacgaacataacaacgttagttatcaacagcatattgcgatcgttgatgcgatccgccgtcatgatcctgacgaagccgatcgtgcgttgcaatcgcatctcaacagcgtctctgctacctggcacgctttcggtcagaccaccaacaaaaagaaataatgccactttagtgaagcagatcgcattataagctttctgtatggggtgttgcttaattgatctggtataacaggtataaaggtatatcgtttatcagacaagcatcacttcagaggtatttatggcaacgaatttacgtggcgtaatggctgcactcctgactccttttgaccaacaacaagcactggataaagcgagtctgcgtcgcctggttcagttcaatattcagcagggcatcgacggtttatacgtgggtggttcgaccggcgaggcctttgtacaaagcctttccgagcgtgaacaggtactggaaatcgtcgccgaagaggcgaaaggtaagattaaactcatcgcccacgtcggttgcgtcagcaccgccgaaagccaacaacttgcggcatcggctaaacgttatggcttcgatgccgtctccgccgtcacgccgttctactatcctttcagctttgaagaacactgcgatcactatcgggcaattattgattcggcggatggtttgccgatggtggtgtacaacattccagccctgagtggggtaaaactgaccctggatcagatcaacacacttgttacattgcctggcgtaggtgcgctgaaacagacctctggcgatctctatcagatggagcagatccgtcgtgaacatcctgatcttgtgctctataacggttacgacgaaatcttcgcctctggtctgctggcgggcgctgatggtggtatcggcagtacctacaacatcatgggctggcgctatcaggggatcgttaaggcgctgaaagaaggcgatatccagaccgcgcagaaactgcaaactgaatgcaataaagtcattgatttactgatcaaaacgggcgtattccgcggcctgaaaactgtcctccattatatggatgtcgtttctgtgccgctgtgccgcaaaccgtttggaccggtagatgaaaaatatctgccagaactgaaggcgctggcccagcagttgatgcaagagcgcgggtgagttgtttcccctcgctcgcccctaccgggtgaggggaaataaacgcatctgtaccctacaattttcataccaaagcgtgtgggcatcgcccaccgcgggagactcacaatgagtactacaacccagaatatcccgtggtatcgccatctcaaccgtgcacaatggcgcgcattttccgctgcctggttgggatatctgcttgacggttttgatttcgttttaatcgccctggtactcaccgaagtacaaggtgaattcgggctgacgacggtgcaggcggcaagtctgatctctgcagcctttatctctcgctggttcggcggcctgatgctcggcgctatgggtgaccgctacgggcgtcgtctggcaatggtcaccagcatcgttctcttctcggccgggacgctggcctgcggctttgcgccaggctacatcaccatgtttatcgctcgtctggtcatcggcatggggatggcgggtgaatacggttccagcgccacctatgtcattgaaagctggccaaaacatctgcgtaacaaagccagtggttttttgatttcaggcttctctgtgggggccgtcgttgccgctcaggtctatagcctggtggttccggtctggggctggcgtgcgctgttctttatcggcattttgccaatcatctttgctctctggctgcgtaaaaacatcccggaagcggaagactggaaagagaaacacgcaggtaaagcaccagtacgcacaatggtggatattctctaccgtggtgaacatcgcattgccaatatcgtaatgacactggcggcggctactgcgctgtggttctgcttcgccggtaacctgcaaaatgccgcgatcgtcgctgttcttgggctgttatgcgccgcaatctttatcagctttatggtgcagagtacaggcaaacgctggccaacgggcgtaatgctgatggtggtcgtgttgtttgctttcctctactcatggccgattcaggcgctgctgccaacgtatctgaaaaccgatctggcttataacccgcatactgtagccaatgtgctgttctttagtggctttggcgcggcggtgggatgctgcgtaggtggcttcctcggtgactggctgggaacccgcaaagcgtacgtttgtagcctgctggcctcgcagctgctgattattccggtatttgcgattggcggcgcaaacgtctgggtgctcggtctgttactgttcttccagcaaatgcttggacaagggatcgccgggatcttaccaaaactgattggcggttatttcgataccgaccagcgtgcagcgggcctgggctttacctacaacgttggcgcattgggcggtgcactggccccaatcatcggcgcgttgatcgctcaacgtctggatctgggtactgcgctggcatcgctctcgttcagtctgacgttcgtggtgatcctgctgattgggctggatatgccttctcgcgttcagcgttggttgcgcccggaagcgttgcgtactcatgacgctatcgacggtaaaccattcagcggtgccgtgccgtttggcagcgccaaaaacgatttagtcaaaaccaaaagttaatcctgttgcccggtctatgtaccgggcctttcgctaagggaagatgtatgtcgttacttgcacaactggatcaaaaaatcgctgctaacggtggcctgattgtctcctgccagccggttccggacagcccgctcgataaacccgaaatcgtcgccgccatggcattagcggcagaacaggcgggcgcggttgccattcgcattgaaggtgtggcaaatctgcaagccacgcgtgcggtggtgagcgtgccgattattggaattgtgaaacgcgatctggaggattctccggtacgcatcacggcctatattgaagatgttgatgcgctggcgcaggcgggcgcggacattatcgccattgacggcaccgaccgcccgcgtccggtgcctgttgaaacgctgctggcacgtattcaccatcacggtttactggcgatgaccgactgctcaacgccggaagacggcctggcatgccaaaagctgggagccgaaattattggcactacgctttctggctataccacgcctgaaacgccagaagagccggatctggcgctggtgaaaacgttgagcgacgccggatgtcgggtgattgccgaagggcgttacaacacgcctgctcaggcggcggatgcgatgcgccacggcgcgtgggcggtgacggtcggttctgcaatcacgcgtcttgagcacatttgtcagtggtacaacacagcgatgaaaaaggcggtgctatgaccacactggcgattgatatcggcggtactaaacttgccgccgcgctgattggcgctgacgggcagatccgcgatcgtcgtgaacttcctacgccagccagccagacaccagaagccttgcgtgatgccttatccgcattagtctctccgttgcaagctcatgcgcagcgggttgccatcgcttcgaccgggataatccgtgacggcagcttgctggcgcttaatccgcataatcttggtggattgctacactttccgttagtcaaaacgctggaacaacttaccaatttgccgaccattgccattaacgacgcgcaggccgcagcatgggcggagtttcaggcgctggatggcgatataaccgatatggtctttatcaccgtttccaccggcgttggcggcggtgtagtgagcggctgcaaactgcttaccggccctggcggtctggcggggcatatcgggcatacgcttgccgatccacacggcccagtctgcggctgtggacgcacaggttgcgtggaagcgattgcttctggtcgcggcattgcagcggcagcgcagggggagttggctggcgcggatgcgaaaactattttcacgcgcgccgggcagggtgacgagcaggcgcagcagctgattcaccgctccgcacgtacgcttgcaaggctgatcgctgatattaaagccacaactgattgccagtgcgtggtggtcggtggcagcgttggtctggcagaagggtatctggcgctggtggaaacgtatctggcgcaggagccagcggcatttcatgttgatttactggcggcgcattaccgccatgatgcaggtttacttggggctgcgctgttggcccagggagaaaaattatgatgatgggtgaagtacagtcattaccgtctgctgggttacatcctgcgttacaggacgcgttaacgctggcattagctgccagaccgcaagaaaaagcgccgggtcgttacgaattacagggcgacaatatctttatgaatgtcatgacgtttaacactcaatcgcccgtcgagaaaaaagcggaattgcacgagcaatacattgatatccagctgttattaaacggtgaggaacggattctgtttggcatggcaggcactgcgcgtcagtgtgaagagttccaccatgaggatgattatcagctttgcagcaccattgataacgagcaagccatcatcttaaaaccgggaatgttcgccgtgtttatgccaggtgaaccgcataaaccaggatgcgttgtcggcgagcctggagagattaaaaaggttgtggtgaaggttaaggctgatttaatggcttaaaacttagttcgttttaaagattctgcagacactgtctgcagaattcgaaaccgctgaaattaacggcgtctatagccttcctctagcaccgcctgtgttcgaacgagttcatctgcgagtcgtttctcatcaggtagttgcatcttatattcgcttgccagaacggtgttaggcaaacctgccagagcataatgcgcttctccggctcctttctctgcacagagaaccagaccgatgggcggattttcatccggtagcgtccagtgctctttggcgtagttgagatacatattcatctgtccggcatcgctatagctgaatttgcccacttttagatcgacgattagcaggcagcgtaaacggcggtggaaaaacagcagatcgacacgaaaccagttgtcatcaatgcgtaaccttcgctgccgaccaacaaaggcaaaatcatccccaagttccagcatgaaatccatcaggtggttgatcagcgcctcctcaaaatcggattctgaatattcatctttcaattccagaaattcgagtacaaagggatcgcgtatcgcctgttgcggaagaatatgcgtctcggcaggagcgtgttgttgcagcatggctgatttgtcatgtgacagtagtgtccgctcataaaactgggtcgcaatttgccgctctagctggcgaacagaccagccacagcggagcgtctctttttcataaaagctgcgggcgtcagcgtttttaacggaaagtaaacggacgtaggtggacctgggcaaggggaaagatttggcagacagcgtctgccaaatctttgccgatgggaattctgcagacggtgtctgcggaattcccaatggtgttaattcgccagacattgtctggcgaatttcaacatgttgaaaaaagaggtaaaaaagcctcatttggcgtaagttttttgcagagaacccacgcttataccttagacataaatcctttgatagtcgcttgattagctgcgcaccatacgcagccctggcctcgccaccttgttcaaattcgacaattcgtcggccaatttcctggtacgtcgcggtcattaacgcgttaacgctacgtaccgtttccgtccgggcgctatcgaccagatgaataataccgtcgtggatttgctggtagcctgctgtggttccttctgagagcgattccattatctgtccctttatatggagctaagttgaataatggaatgagctatactctggggggtgagcactgaacaattaagaacagcgtattacatttactttccccaagatatgcgaagagctttcctgaaacattaaccgatcgtataaaacgaatgcctgatagtactcctgtccggcattgttatcacaagtagactacgcttatcacagctttcccatcaagttcgattttttctgaaccgcctaaatcattcgcgatagatgcgctcacctgaagcggtataatggcgttcgttacaggagttggggttgtttcacctggttttacaaaggtgtaataatagctttgatcgactgcaagcggataagcggtgagcgtttgccatgctcttttttgccctgttatgacggcatctgcacctgctattgatacagctaacgtctggctaccattgctggcactaatgttgttgctatcaattaacacggcataactaccgatatttttattatcttttgttttccctaagccgaataagcgcgttgtctggctaatataacctccgccatttaaggtatattttacaccactctgacccccactatcttttccggtggtcatactatccattcgtgtatcacgagcggtaatcgcaatgccggtagcggattcgcaagttatagtcatattaatattacgtgttccaatctgtgtgtagtgctgcgttgaaagtctattgactgaatgactaccgaagttaacaactccgccgttgcttagtattggagtacaagctgcagcttccagagtcaccttaacgtcaattgatactctatcagcggcttgcgctgacatggcaaaaaaggcacttccggcaatcagtaattttacattgttcattttgcctccaccaggaccgtcagattgcctgtaatatctgtcatgtcggttagttccccttcatccttaaaagctggagccattgtcagtgtgaggctaacgcttttaccgctatcaattaccacttcttgaccattttgcataaacaccagccaattattgggggaagtactaattgatgctgttcctgtgctgcccggattgtcatttttgccactggctaacgccaggtcgagattgttactacctgaaaatgcatcgctggcgatcagatttaatgaaccattcgggccaaatccaaatccgttgttggaaatattagcggtattcaactgaacacgaatatgagcgtcctgatcgcattgcattaccagcgtgattgttctgtctgctaattgtgttgttttaccccggtcaacttggcgcatggcagcacttcgtttgccatagtcgatattttgtatgctactggagatattacactctgcctgagcggccatggcgaagttcagcagcaggcatcctgttattatccgtttcattggcactctcctgttgctgtctcatagaacacatcttttggtgcatcttctgggaatgtaaggtgaatacggcatgattgctgctcatcttttatatctagcaccatgtccggtttgatgttattgaggaatacaacaccgtcatccactgatgttgtcagatagttgccttcactatcttcaatcgcaacgcctctgggcagttttttgccgtcggaaagtgtgatattgagtaatgcacggcgttgtgttatcgcactgaatccgactttccctactgcaccacggccttgtttgatcatttttgtgccgttaccgatatcgacattttttggcaagctggcggtatcgatctcaactcctgatgttcgccacggctggattgatggaatgacggcattaccccgaaaatctgtccatactgggcctgcctgagatgtaattctgacacctgcaatattgttatccatttttgcgatggcgaaagtgtcattgatagtccacggtgaaaaggtcactccctgatcatgtacggcaataccacctgacatcgtaccgttgtaagtacggctatcactgccgcttgctcctgcggcaaggctgacttgggtgtaatggagattggaactgatactgccgttcaagctcgtttcacgttcgtcgtgatctcgttcagcattcacatagtaggacatctcatctgagacgactcccatgacaccagtaccatagtgggttttatgatcgtcatggcgagtatacagtgtggcggtgtttgatctgccaaatggaatactgatgttgacgtagaacagatcaccatcgtcttcattattttctgaagcactaagttgatgctgccagttgacggaaaccgtggcgtgtttgaacgctttgttccagttaatattaaggttgcttgagtcattgtcaccgtcgtaactatatgttttatagccactgatgttgaaaccacccagaatggagttagaccagtttaaaccaagcgcataagtgcttttagtcggatcggtataatcatcatcaatcgcttcagacagttcgcgataatggcgatcagatcgagtgaggctggttgttagcccaagtgaaaatgggagattgtagttcgcgtcaagacgatatttctgtccttgcagtgagtctttcgtatcctgcgatgtactaatttggctgctcactgttaaatcgggcaggggaaccagactcgaccggattgatgccgcctgataattttctgctacgataacgccgccgttcattgcactccagcgtgtcagattccatccgctcgatgcactaattacccaaggtgattcgtcatagtcatcgtctacccgccctatcgcgaagcgataaccctggaagctttctacatgctgattaaacagggtggagggaacaatatagttgtgcgaactaccgtctgtttcgacaacggtgacattaagatcactattaccattgcgaacaggtacatcagggatagtgaatgcgcccgcaggaaccagaatggaatgaattaaaactccttgttgacgaatctcgacacgagcctgagaggtgttggctataccagtaacttgcacaccactgccgctggtttgcaatgcgttgtccggtgcgatttcgataccgtaaatactggctccttccaacacgctattattgaggttaacttcacctgctcgcatgagtgttttaagatctgtaaaggtacgttgaaggtaggttgacgagttctggttactgaatgtgccatttgtttgtgtaaggaactgatggctgcgtaacatccagtcattaatattaatcccgccttcaagtgcagcctgggagtagtccgaactcccattagaaaattctgcacggctgctcatcagagagtagtttagcagcgcagctgttccaccagttgctgcgtttgtgagatccaaccctatgggaatgatcgcctgtggtgaaacgataatatctaacgcttcctggttaggtaatggtgtgattgtggtacccgggtaggacaatatatagtcgtaacagccatttttttcttcagaaggaatttttaaaccggcttgttgcagaaatgcctgatcaagacaaatgtcgccattttcatcaaagcgcgtagcaatgttgccttttttttcgccatttactgatactatcagtgaatattcacctggcaaaaaacgggctgaacgggaaaaataatgcgatatattaggatctacacctagtgattttaatgtttcccgatcaaaatcaacagcggcaatctctataccatctgcattggctgggggagaaaaggcaaaaccaatggtgtaggccagtaacgtttttttaacatccttgtcgctccaggcaaagttattttaagtcagtgacatatttattaccgcgataaccatatcggctggctgggtaaaactcgacttttgtatccgtagcgtttgttaatgcagtagttgtactggtgtgtggtagaaaataggtcttatttatagcccccgtttttcctgaagggagcgttttaaattgtaaggtcatacgaacgacataattactggggttgctaatctcaatttggtcgccatttttacgccattccaggaatttccaggtctctcgctcttccggcagggaagccgggtggatcagtacaggtagatcctgacgaattgaaacagtaactctgctgctcttgtcatcttttggtggaataccttcgaacgttacgcgtttcagctcttctgattgcagaggaacagtcgcctgaagtaaaaatcgaacctgttgtacttgaccggcttcaacacgaataacgggctgagtcgggattaaacgaattgatttattgctttcaggcaaatcaacaatggtggtgtaaagcaatgaaggatgatcatctgtattcttaatattaatactagcttcaccacgcttttcatcaaccagcaatactgatgtttcaggaaccatccctgtggctaaggtattcattgatgttgttataaatacagtgaatgtaatgtgtctgagcatttaaattaaaactcctgtaataatgataaataacgcagaaacatattgttaatatatgttatgcactgtttgcgatgagattgattaagacagaccatgtcatagggcataatctgtccgagttatagctaactggttaatgcgtaaaaataaaaactgtattacaagttcttataaatactgaacgctgatagtgacgttaccatccagtttgatcgtttcatcagaaccaagaatagtattgtcatttaccgcagcatcaatcagtaacgggaaggtgaccgctgtaatggcaacaggtgtcagttcccctgtttttgcaacagaataaccgcgctcgattgctgagcaacttgtcagcgagcagaatgcgccattagatgaggctttccatgtgggggtcgctgctgaccagtggtcagtttgaatcaggtcgacaggaatttcacctgtatcgtccgccgcgtgaatcccaccattagacctgtcaataccaatggatgcagcgccaattttttgtccattaggcgcagaacctaaaccaaaggcgtttttcgttcccttcatatctacgagagtatcataagctttttcaatataggatgtgtcgtttaacgctacaatggtcgactgacggttatccttggaggttacagcaattagcgttggtgctgtgcaggttatatttaatgtgctgtttttgcggcccagttgaaccagtttattacttttaccggtcggattcagcgcactgttatgatgtttcccatagtcaacaatgccgccgcccgtaacaactggggtacatgcaccaggggtatactcgccgatgatagttaattctgtatcagttgaatctgttgccatggcactgaatgctgcaacagaaagtgctgcacaaatagcagctgttgtgaggttctttttgaaaaacatatgaacatatccttaataacaaatttattttttaaaataaaaagctgaagcagtatatatatctgtttgtgaatgtaaataaataactcgttcagaaatagccaacttgctgggatgtatttatttaatgaattttatagttacgatcatgtgaataataaggtgctggtgaggtggtttgtggtgataattattcattacatgaatgtttgcgctgaaaaataggaaaatatatagataattaaggataatatattggttttttatattcatattttgtatattaatatcgagacaatttacatggaatgaaaagactgaatagcttgcagaatcggtattgtcagaggtgttaacaagtaattgagacggattgtaaatgagaaattgcttgatatgcttcactcatcagacttggtgaacaaagcacaatttattgaaaattatccctattataggaaaggtcaaacgctcatgccgcatttgccagaaaacaacgcgcacttcgtcagtaatttgattcgccagacacagtctggcgaattcattgttacctcgcttaaacttccagccagttcataataccgtctgccgccttacgaccttcggcaatagcggtcaccaccagatcggaaccacggacgatatcgccgccagcaaagattttcgggttgctggtctggaaggcgttgtcgctgccttccggggcgatgatgcggccttgtgaatccagctcgacgctgtgttttgccagccattccatgttgtgtggacggaaaccaaacgccatgatcaccgcatctgccggaacgatatgttcggaacctgcaacgatctccgcgcggcgacggcctttggcgtccggttcgcccatttcggtacgcaccatttttacgccgctgactttgccgttaccgttcacttcaatacccagcggctggacgttgaatttgaactctacgccttcttcccgcgcgtttttcacttcgcggcgggaacccggcatgttctcttcatcacgacgataggcacaggtaacgtgcttcgctccctggcgcacggacgtacgcacgcagtccatcgcagtgtcgccaccgccaaggaccaccacgcgtttgccttccatgctgacgaacggttcgtcgcgggtttcaccaaagcccattaactgtttggtgttggcgatgaggaacggcagcgctgcgtacacgccatcggcgtcttcgttttccagcccgccgcgcattgactgataagtcccgacgccaaggaacacggcatcgtaatcactcagcagatcgtccagctgtacgtcgcggcccacttcggtattgagtttgaattcaatacccatgccggtgaagatttcacggcgacgcgtcattacctctttttccagcttgaaggccggaataccgaaggtcagcagcccgccaatttctggatgacggtcgaagacaacggcttttacgccgttacgcgtcaggacatccgcacacgccagacctgccgggcctgcgccgataatcgccacttttttaccggtctgtttcacaccagacatatccggacgccagcccatctcgaacgctttatcgttgatatagcgctcaatgttgccgatggtcaccgcgccaaactcatcgttcagagtgcaggaaccttcgcacagacggtcttgcgggcagactcgtccgcaaacttccggcagggtgttggtctggtgcgacagttccgccgcttcaaaaatacgcccctcgttggcgagcttcagccagttcgggatgtagttgtgtaccgggcatttccactcgcagtatgggttgccgcacgacaggcagcggtcagcctgcgctttggcctggccttcggaaaacggctcgtaaatttcaacaaactcaattttgcggatcttcagcggtttctttggcggatcaacgcgctgcaggtcgataaattgataaacattctgactcattgttgctaccccttactgcgcctgcacgcgcaactcagctgcgctacgactacggtgacccagcagtgcttttacatcactggacttcggtttaaccagcgcaaatttagtggcgaaggttgaccagttcgccagaatctcttcaccgcgctgagagccggtatgctgcacatgctcggtgataagaccacgcagatgctcttcatggatcgccagagcgtcaacgcttaagacctcgaccagttccgggttaacgcgtttgcggaaatcgccgctttcatcgagaacgtaagcgaaaccgccggtcatgcccgcaccgaagttaacgccggttttacccagaatgcagacgataccacccgtcatatattcacaaccgttgtcgccaatgccttctaccacggtgatagcaccggagttacgcacgccgaaacgttcacccgcgcggcctgcggcatacagacgaccaccggtcgcgccatacaggcaggtgttgccgataatgcttgcttcatggctgcggaaggcggaaccaaccggaggacgaatggcgattaagccgcccgccatgcctttaccgacatagtcgttggcatcaccggtcaggtacagttccacgccgcccgcgttccacacgccgaagctctggcctgcggtgccgttgaagtacgctttgataggatcggctgccagcccctgatcgccgtgcgtctgggcgatatagcctgaaagcgacgcgccgacagaacggtcggtgttgcgaatatcgaaccagaaggttttgctctggcgctcatcgacaaacggtttcgcctgttgcagcaactgcgcgttcagcaggccgttatcaaacggcgggttgttttcggtgcagtagagtgccttacctggatgcggttcggcagtctccagcagcttcgacagcgccagcttctgctgtttggcggtgaaaccgtccagctctttcagcaggtcggtgcgaccaatcagatccaccagacgtgttacgccaagctgtgccatcagctcgcgggtttcacgggcgataaactcaaagtaattcgtcaccttgaatggcaggccgtgatagtggttcttacgcagtttgtcatcctgagttgctacacccgttgcgcagttgttcagatggcaaatacgtagatatttacagccgagcgccaccatcgggccagtgccgaagccgaagctttctgcgccgagaatcgccgccttgatgatatcgacacccgttttcaggccgccatcgacctgcaaacggatcttgtgacgcaagccgttagcaaccagcgcctgctgggtttcaacaagccccagctcccacggacagcctgcgtatttcaccgatgaaagcggacttgcgccggtgccgccgtcatagcctgcgatggtgatcaagtccgcataagcttttgccacgccagtcgcgatggtgcctactcccggttcggaaaccagcttcacggagatcatcgctttcgggttaacctgcttgaggtcgaaaatgagctgcgctaagtcctcgatagagtagatatcgtggtgcggcggcggggagatcagcgtcactccgggcaccgaatagcgcagtttggcgatgtaaggcgtgactttatcacccggcaactgaccgccttcgcctggcttcgcgccctgggcgactttaatctgaatgacgtcggcattgaccagatacgccggagtaaccccaaagcgaccggaagccacctgcttgatgcgcgacactttgttggtgccgtagcgcgccgggtcttcgccgccttcaccggagttcgaattaccgccgatgctgttcatcgcttccgccagcgcctcgtgggcttccgggcttaacgcgccgatagacatcgcggcggtatcaaagcgtttaaacagttcgcttgccggttcaacatcagcaatgttgaccgcgttttcacccggcgtaattgccagcagatcgcgcagcgtggttgccggacgctcattaaccagcttcgcgtattcctgatagtcgctgtactcgccgctttgtaccgcttgttgcagcgtgcgcaccacgtccgggttgtaggcgtggtattcgccgccgtggacgtatttcagcagaccgccctggctgatgggcttacgcgccagccaggcacgtttcgacagattcagcagatcctgctggaagtcttcaaagcttgctccaccaatgcggctgaccgccccctggaagcacaggcccactacatcatcgtgtagaccgaccgcttcaaacagtttcgagcagcggtaagaggcgatggtggagatgcccattttggacatgattttgtacaagcctttgttgatgccgttacggtagttgagcatcacggtacgataatctttggcaatcgcatgggtgtctaccaggcggcccagcgtttcataggcaaggtatggataaatagccgtcgcgccgaagcccagcaacacggcgaagtggtgcggatcgcgggcgctggcggtttcgacgatgatgttggcatcgcaacgcaggctttgatcgaccagacgggtctggatcgcgccaaccgccatcggggctggaaccggcaggcgatctttagcgatattccggtcggagagcaccagcagcacggtgccgctacgtaccattttttcggctttgtcgcacagctctttgactgtcgcttcgagcgtggttttagtgacgtcaaaggtgatatccagcgtatctgcgcggtagtgctcctctttcatcgtcgtgagctgtttgaaatcggagtagagcagaatcggcgatttaaagcttaaacggtgcgcctggccctctgcttcgcaaaagacgttcatttcacgaccgatactggtggcgagcgacataacatgcgcttcacgcagcgggtcgattggcgggttagtcacctgggcaaactgctggcggaagtagtcgtaaataatgcgcggctgactggagagcacggcgaatggggtatcatcgcccatcgaaccgaccgcttcctgaccgttttcgcccagtacgcgaattacggagtccagctcttccgcgctgtagttaaactgtttctggtagctggcaagcgtgtcgtcgtccagttcgcggctacccacttcttcatcgggcagatcttcaaacggtaccagtcggcggacgtttttctccatccactctttatatggatggcggcttttcagatcgtcatcggtttctgccgagtgcagaatacgcccactgcgggtgtcgataaccatcagttcgcctggcccgacgcggcctttttcgaccacttcgtcaggctggtaatcccagataccgacttcagaggcgcaggtgatgagcttatctttggtgatgacgtagcgcgccggacgcagaccgttacggtcgaggttacaggcggcaaaacgaccgtcggacatcacgatgcccgccgggccatcccacggctccatatgcatggagttaaagtcaaagaaggcacgcagttccgggtccatatccgggttgttctgccaggcgggtggtactaatagacgcatggcgcggatgatatccatcccgcctgccagcagcagttccagcatgttatccatcgaactggagtcagagccggtttcgttgacgaacggtgcggcgtcgtgcaggtcagggataagcggtgtctggaatttataagtacgcgcacgcgcccattggcggttaccggtgatggtgttgatttcaccgttatgcgccagatagcggaacggttgcgccagcggccagcgcggtacggtgttagtggagaagcgctggtggaacaggcaaatggccgattccagacgcaggtccgcaagatccagataaaagcgcggcagatccgtcggcatacacagacctttatagatgttcaccagattcgacaggctacagacgtagaagtctttgtcggcttcgagacgcttttcaatgcggcggcgggcgataaacagacggcgctccatatcgcgtggacgccagcctgccggggcgttcacaaaaatttgctcaatgcgtggcagagaggagagggcgatttcacccagcacgccttcgttagtggggacatcacgccagcccacaatcgacaaggtttcgcgttgcagttcttcttcaacgatgcggcgtgcggcagcggcgagttcaggatctttattcaggaagagcatcccgacagcgtagttttttgctaaacgccagccgcgctcctgcgcaacgatgcgaaaaaagcgatccggtttttgtaacagcaagccgcaaccgtcgccggttttaccatcggcgagaatcgcgccacggtgctgcatgcgggccagtgcgtgtattgcagtacgcactaccttgtggctaggttcgccttctatgtgggcgatcaggccgaaaccacagttatccctctcaagggatttatcgtacaacatatcgtgaacctcccccaggctctgcgggaaccccacttccgaaccgctgcgcacgggcacagaaagagcgtggcgacggggtttgcgtgtcatacgcgcgcctcgcattcgcccccttgttgtccttttcgcatcggttaatacggtgaagaggggatctcaattactgcataaatatgatgagcaggctgctcatccagaaagcttccagcggatttccaacttatcgggaaagctgatacaggtcaaatggcaagcttattggtacagaaatgtgctttagcgcaaaattctttattaaatgactgaaattaaaatggattttatctttaaggctaaaagggaagtcgttagagaaacagtcaattcctgactgtcataaaggtgtgttaacccttatcctgccttgaactgacgacaaaaccagcattttatactgccttaattggtaatgacgtttcatgctactgtttttgcctaaaatccatcaggagataaaaaaatctgacacaagataagcaaaagtgatttatgtgattatgcatgaaatttcgttaattttgattgattatgcagttgataaaagcaggccgggacgattgatccaggtcatcgccgaattgagctaaaaatggcaggctttggcctcttttcaaggcgcggtctatcagattatgcagttacagaaattagtcaatatgtttggtggtgatctcacccgtcgttatgggcaaaaggtgcataagctgacgttgcacggcggttttagctgccctaaccgtgacggtaccatcgggcgtggtggctgcacattctgtaatgttgcctcgtttgccgatgaagcgcagcagcatcgttccattgccgagcaactggcgcaccaggcgaatttagttaaccgcgctaaacgctatctggcctactttcaggcgtataccagcacctttgcggaagttcaggtgctgcgttctatgtatcagcaggcggtgagccaggccaatattgtcggtttgtgtgtgggtacccgcccggactgcgtgccggatgcggtgctggatctgctttgcgaatataaggaccagggttacgaagtgtggctggagctggggctacaaaccgcccacgacaaaacactgcatcgcatcaaccgcggccatgattttgcctgttatcagcgtacaacccagctggcacgtcagcgcgggctgaaggtgtgttcccacttaattgtcggcctgcctggcgaagggcaggctgaatgtttgcaaacgctggagcgagtggttgaaaccggcgtggacggcataaagctgcatccgctgcatattgtgaaaggcagcattatggcgaaagcctgggaagcggggcgtttgaacggtattgaactggaggattacacgctcactgccggagaaatgattcgccatacgccaccggaagtgatctaccaccgcatttccgccagcgcccgtcgcccgacgctgcttgctccgctgtggtgcgaaaatcgatggacgggaatggtcgagctggatcgctatctgaatgaacatggcgtacagggatcggcgctgggacgtccgtggctacctccaacggagtaggtcgttgaggggaattccgcatttctcacacaatttataacgtaactgtcagaattgggtattattggggcaggttgtcgtgaaggaattccctaatgaagcaaattcgtctgctggcgcagtattatgttgacctgatgatgaagttaggtctggtgcgcttctcaatgttgctggcgctggccctcgtcgttcttgccattgtggtacaaatggcggtaaccatggtgctgcatggtcaggtcgaaagcattgatgttattcgttctatcttctttggtttgctgattacgccgtgggcggtctactttctatcggtggtcgtcgagcaactggaggagtcacgacaacgtctgtcacggctggtgcaaaaactggaggagatgcgcgagcgcgatttgagcctcaacgttcagttaaaagataatattgcccagctaaatcaggaaattgccgttcgtgaaaaagcggaagcagaactgcaggaaaccttcggccaactgaaaattgaaatcaaagagcgcgaagagacacaaattcagctcgagcagcaatcctcattcttacgttccttccttgatgcttcacccgacctggttttttatcgtaacgaagataaagagttttccggctgtaaccgcgcgatggagctgctgaccggaaaaagcgaaaaacaactggttcacctgaaacctgctgatgtttactcaccggaagccgccgcaaaagtcattgaaaccgatgaaaaagtgttccgtcataatgtgtcactgacctatgaacagtggctggattacccggacgggcgcaaagcctgctttgaaatccgtaaagtgccgtactacgaccgcgtgggtaaacgtcacggtttgatgggctttggtcgcgacattaccgagcgtaagcggtatcaggatgcgcttgaacgggccagccgcgacaaaacgacgtttatctccaccatcagtcacgaattgcgtacaccgctgaacggtatcgtcggtctgagccgcattctgctggataccgaactcaccgccgagcaggaaaaatatctcaagaccatccatgtttcggccgtcacgctggggaatatctttaacgatattatcgacatggataagatggaacggcgcaaggtccagcttgataatcaaccggttgatttcaccagcttccttgccgatctggaaaatctctccgcattgcaggcgcaacaaaaaggattgcgctttaacctggagccgacgctgccattaccgcatcaggtcattaccgacgggacgcgtttacggcagatcctgtggaacctcatcagtaacgccgtcaaattcacccagcaaggccaggttaccgtgcgcgtgcgctacgatgaaggcgatatgctgcattttgaagtggaagactctggtatcggcattccgcaggatgagctggataaaattttcgccatgtattaccaggtgaaagacagtcatggcggtaaacctgccaccggcaccggtattggtctggccgtttctcgtcgtctggcgaaaaatatgggcggcgatattacggttaccagcgaacagggcaaaggttcaacctttacgttgacgatccacgcaccgtcggtagcagaagaggtcgatgatgcgtttgatgaagacgatatgcctttaccggcgctgaatgtgctgctggtggaagacattgaactgaacgtgattgttgcgcgttctgtgctggaaaaattaggtaacagcgttgatgtcgccatgaccggcaaggcggcgctggagatgtttaaaccgggcgaatacgacctggtgttgctggatattcagttgccagatatgaccgggctggatatctctcgtgaactgacgaaacgttatccgcgcgaggatttaccgccgctggtggccttaaccgctaacgtgctgaaagacaaacaagagtacctcaatgctggaatggatgatgtgctgagtaagccgctttctgttccggcgctaaccgcgatgatcaagaaattctgggatacccaggatgatgaggagagtacggtgacgacagaagagaacagtaaatcagaagcattgctcgatattcccatgctggaacagtatctcgaacttgtaggaccgaagctgatcaccgacgggttagcggtgtttgagaagatgatgccgggctatgtcagcgtgctggagtcgaatctgacggcgcaggataaaaaaggcattgttgaggaaggacataaaattaaaggtgcggcggggtcagtggggttacgccatctgcaacagctgggtcagcaaattcagtctcctgaccttccggcctgggaagataacgtcggtgaatggattgaagagatgaaagaagagtggcgtcacgacgtagaagtgctgaaagcgtgggtggcaaaagccactaaaaaatgaccccggctagaccggggtgcgcgaatactgcgccaacaccagggaaatcttggctgcgccgtaaattattatgatgagttacaagggcacagcactgtttttcaggccgcacgcagttaagatagcaaaacttaaatgatttgttacatgaatcagttaaatgtgtgatgcgtaccatttttattaaaaaaattaatgtgtttcagtcaattgcgaaaggatgatcacaatgaagaaaattggcgtaattctgagcggatgcggcgtctatgacggttctgaaattcatgaagcggtgttgacgttgttagctatttcacgcagcggtgcgcaggcggtctgctttgcaccggataagcagcaggttgatgttatcaaccatttaactggcgaagcgatgacggaaacgcgcaatgtgctgattgaagcggcacgaataacgcgcggtgaaatccgtcctctggcccaggccgatgccgctgaactggatgcgttgattgtgccgggggggtttggcgcggcgaagaatttaagcaattttgccagtcttggtagcgaatgcaccgttgaccgtgaattaaaggcgctggcacaagcgatgcatcaggtcggaaaaccgcttggttttatgtgtattgccccggcgatgctgccgaaaattttcgatttcccgctgcgtttgaccatcggtactgatatcgataccgcagaagtgctggaagagatgggcgcggagcatgtgccgtgtcctgtcgatgatatcgtggttgatgaagacaataagattgtcaccaccccagcatatatgctggcgcagaacattgcagaagcggcgagcggcattgataagctggtttcccgcgtgctggttctggctgaatgagtaaaagccgcttaacggtgtttagtttcgttcgccgttttcttttgcggttaatggttgtcctcgccgttttctggggcgggggcatcgcgttgtttagcgttgcgcctgttcccttctcagcggtaatggtcgagcgacaggtcagcgcctggctgcatggcaattttcgttacgtggcacattctgactgggtcagtatggatcaaatctcgccgtggatgggactggcggtgattgccgcagaagatcagaaatttcctgagcactggggctttgatgtcgcttccattgagaaagccctggcgcacaacgagcgcaatgaaaaccgtattcgcggtgcttcaacgatttctcaacagacagccaaaaatctctttttatgggatgggcgtagctgggttcgaaaagggctggaagccggattaacgctggggatagaaacggtctggagcaaaaagcgtatcctgacggtttacctgaatatcgccgaatttggcgacggtgtgtttggcgtcgaagctgcggcacaacgttatttccacaaacccgcgagcaaacttacccggtcggaagctgcattactggcagctgtattacctaatccacttcgtttcaaagtctcctcgccatcgggctacgtgcgtagccgtcaggcgtggattttacggcagatgtatcagttaggcggtgagccgtttatgcaacaacaccagctggattaagcttcgcgcgaagtgagggccagcgttttgctctcacgaggttgcagatctttctgcagggcaatagccagcgccggttgggcgataaatcgtttccataaccgctcttgcttacgcagacaacaccacttcgaccaggtcgccagtggaatcaatgtgctttcaccaatgttgtcgcagacgaccgggataacctctgactcactgatgcggtgacagaggatattctgcggcttcagcgacatcgtcacgatacggttatcctgcaaataacgcttcagctgtttcagtagctggcgcagttgtgcaatgtcttcttcgtaacggcattgttcagcaaattcggtcagcgtaatggaaggcttgccgtcaaaatctgcaatcacatcgtagacataaccggttccgcaatccgtctcaacggtaccgtgatagcgcggtattccactccagtcttttaaccggcgaccaagatgcgcgtagtactttaactcacggcggatctctttatcgccaccatcgccacgatggtagacaatcttgatacagcgttgggcatcttccggatgcgcataacatttccgatgtcttccggtgcccaggggactttgttcagataagcgaatcatgccatctcctggaaatattttctgacgatctccagtatggtcgattaacttaaacaaaacctaaacaatgcctcttaaggttttcttaaggttcttctgaaagtgaaaagcgcacaaaatgtacaaatgacgttgattgagaacgatttcagtacgtgattttcttattgtcggggggagtttgaagggagttgtatgtcaaagtgatgaagattaatcttcatcaaaaccagaattaaagagggcgataacggcggccagtgcttcctcttcctgtggaccggtcgcttcaacttcaatctgccgtcctttggcagaatccaacatcagcagcgcaataacgctgttggcttcagcctcggtgccttcgtcattacgtaagagcacttcagcgtcaaaaccctgcattaattcaaacagcttcattgcaggccgggcatgcatgcccagcttgtttgtgatttcaacagtttgcttgacggtcatggtttacgtttttccagcgtacgatggcgtgactggacgtttttaccgcgcgagcggaagtagtctgccagttgctctgcaatatacaccgaacggtgcttcccgccggtacaaccaatggcgaccgtcaagtagctacggttgttggtttccagcataggtaaccatagctcaagatagcttcgcgtctggtagataaaattgtgtacttctgtgtggcggtcgaggaacgcggcgacaggtttatcaagacctgtcattggacgcagtttcggatcccagtgcgggttcggcaagaagcgcacgtcaaagacgtaatctgcatcgatagggataccgtgtttgaagccgaaagactcaaagaccatggtcagttcgcgttcacgtttacccagcagacgggtacgcagcatttcagccagctcgtgaacggacatttctgaggtatcgacaatcagatccgctcgcgaacgcagaggctccagcaaatcgctttctttgtcgatagcactttccagcgacaggtttttgctggaaagcggatgcagtcggcgcgtgtcactgtaacgacgaattaaggtattacggtcggcatccaggaacaggagttgcggtgagaaagcgtcaggcaggttactcatcgcctgttcgaatatttctggtgactccggcatattacgaacatcaatgctgacggcggcagaaatctcgcgatcggccagggttcgagccagatcgggtaacaacactacgggaaggttatccacgcagtaaaaacccatatcttccagcgcacgcagggcgacagatttacctgaacctgaacgtccgctgacgatcatcagtaccatgtactgtttctcctcacaacgtctaaaagagacattaccgaataactacgcttcatccggagtaccttcggtatccgtaatgatttgatacagctcttcatcgctctgggctgcgcgtaaacggcggcagatggttttgtccgccagacgtttcgccaccagcgacagagtatgcaggtgcgttttagtttggtctgccggcaccagcagggcaaaaagtaagtccaccggttggttgtcgatggcatcgaaagctataggcgtttcgagctgaacgaaaacgccaacggcgcgcagagtatcttcttccagtttgccatgcggaatggcaataccattgccgataccggtactgcccattttttcccgcgtcaggatagcttcaaaaaccacctgaggcggcaggctaagttgtttcgccgccagctcgctgatgatttccagggcgcgttttttgctctgacagtggacgcggcttcgcgtacattccctgttaagaacactgctaagctgtagagttgtatcattatttgtcataatttcacctaagaacctgcccactcaaacagtggaacaggctcggagcattaaccgtacaaatggcccgttgtgccgcacaacagaccgccatgcacatgctaattgcccggacaattagtgttgtttcagtttatctttatgtttggtcaactggcgtgccagcttatcaattaagccatcaatggcagcgtacatgtcctgaccttccgcgctggcatgaatttcaccaccgtttacatgcagtgttgcatctgaggtgtgggtgactttctccactttcagaacaacatagacctggttgattcggtcaaaatattgctcaagtttggcaaatttggctgtaacaaattcgcgcagtgcctcggtgatctcgacgttatttccggtaatgttgagctgcatagtgtcttccttatcggttgggtcaaacgagttgtttacgctggtttgacggcggaatggataaagactctcggtacttcgcaacagtgcggcgtgccaccatgataccttgttccgacagcaaagaggttaacttgctgtcgctcaacggtttcgctgggttttccgccgcgattaatttcttcaccagcgcacgaatcgccgtggaggaagcttcgccgccgccctcggtattgacgtgactggaaaagaaatacttcagttcaaaaatgcctcgtggactatgcaggtatttttgcgtggtcacgcgagatatcgtcgattcatgcatttcgacagcctgggcgatatcggccagtaccatcggtttcatatattcttcaccttgctcaaagaaggcttgctgctgttcaacgatacagcgactcacgcgcagtagcgtatcgttacggctttccagactcttgatcaaccatttggcatcctgcagattgctgcggataaactggctgtcaccatcgttgcgcgcgttattgcacatcgaggcgtagtgctggttgatttgcagacgcggaatgctgtcactgttgagttctaccgtccagtgaccgttatgcttacgcaccagcacatctggaatgacatactcaggttcgccagtctggatcgactgcccggggcgcggatcgagcgactggatcagattgacggcttctttcagcacatcttctttcagacgcgtgacgcgcattaaagtgcggaagtcgtgattggctaacagatcgagatgatcgctaatgatcagtctggcctcttccagccacggcgtggtcttatcgaattgggagagttggatcagcagacagtcacgcagatcttttgccgccacaccgaccggatcaaaccgttggatccgcttaaggacggcttcaacttcgtcgatgtcgatctcttcatcgcctatactttcgagaatatcttccagcgggacagtcagataaccggtttcatcaacggcatcgacgatagaggtagcaatagcgcggtcagtgtcggaaaacggtgtcagctcaacctgccacatcaggtaatcctgcaaggtctgcgtcgtttcgccctggtagaccggcagctcgtcgtcaatgtagtcaccgctggtgccggatggtgtaccagcggtgtaaatggtgtcccaactggcatcgagcggcagctcttccggcatctctttttgttcgagcgcgtcggcggtgtccagcgtttcactgtcttgcgtttcgcgggtgtcgatttcttcatgagtgtcgatttgctcaagcagcggattactctccagcgcctgctgtagctcctgctgaagttccagcgtcgacaactgcaacagacgaattgcctgttggagctgtggcgtcatcgccagttgttggctaagcctgagttgcaaaccttgcttcatgttcagaatcgtactctcctgctaaaacgtcgcaaacttctaccctatcagagtctgaagtcttccccaaggtatacacgcttaacgtgttcgtcttgtaagatttctgtaggcgtgccgtgggcgatcaaatgcccctgactgacgatataagcgcgttcacaaaccgccagtgtttcacgcacgttgtggtcagtgatcagcacgcccaggccgctgtcgcgcaggtgctcaatgatgcgtttaatgtcgataaccgagatcgggtcaaccccggcaaacggttcgtcgagcagaataaatttcggattcgcagccagtgcgcgggcaatttctacacggcgacgttcacccccggagagtgactgccccatgctgtcacgcaggtgctcaatgtgaaactcttccatcagctcgttcgcgcggtcttcacgttgttcagcagacaagtcgtcacgaatttgcagtaccgccatcaggttatcgtaaacgctgaggcgacggaaaatggaggcttcctgtggcagatagccgataccgcggcgcgcgcgtgcatgcagaggcagcagactgatatcgtcatcatcaataatgatgttgcccgcatcgcgcggcacaatgcctacaaccatgtagaaagtggtggtcttaccggcaccgtttggccccagcagaccgacaatttccccggagttgacggtcaggctgacgtcttctaccacgcgacggcctttataggcttttgcaaggttctttgcagttaatgttgccataacgaattaattacccttcttctgtgccggggtctggcctttgttgtttttgtcctgcagctgcgacggcaccagaacggttgttacgcgcttgcctttgtcgctgaaagcctgcattttctgctctttcaccaggtaagtgatcttatcgcccttaatgttgctatcgacctgctgcagataagcattacccgtcagaacgacaaaatcttttgccagttcgtagtgcatctgggaagcgtgaccttcaacgggtttaccgttgtcctgcatctggtagaacgttgccggtttaccgtagccgtcaatcacttctttaccttgttcgccgcccggacgggtaacgaccactttgtcggcattaattttgatggtgccctgggtgacgatgacattaccggtaaaggtaaccacgttgccttgcatatcaagagattgctggtccgattcaatgtggatcggctgatcagtgtctccggttacggcaaatgccggaatgctggcggccagaagtgagctggcaagcacaagattaaggctgagtttgtttgttttgaatttcataggatgttctaaccttttcaatcagctcggcgttcttgctgcgtaagttgccgcgcattttcagaccgctggagttaaatgttgttccgtataacgtgacgaggtcttcagaggtaacatcctgcgtcaccagattgatctgcgcgttatccgtcgtgattctgcgaagttgagagtctggcacaagtgcgttgacttcaacgtgtccatataaatagagcatccggtcattggtcagcttggctttatctgcttttacggaccatgtcgggattttatccttatcaaacgtggtaagtaccggctgcgtaaaccacgaaacggcctgatcggaataatattcaacgtgttgagcaatcaatcgatagcttagtgccccttctgggttatagacgagcgtgtccgtatgctcgcttttataggtgggatcattgttgttgacgaccacctgggcggtatcgtctttttcggccatattaatgccgatcatcaccagaaccgccagtgatagcacaatgataacccaacgtctggctttactcatatcgattgccctttggcttcatccagtttgccctgcgccaggagtaataagtcgcaaacttcgcgcactgcgccacgaccgccagcaatgcgcgtcacgtaatcggcgcgcgggatcaacagtggatgcgcatcggccacggcgacgcttaaacccactttttccattaccggccagtcgatgagatcatcgccgacataagccacattttccggggcaatcgccagtttttccagcagatcgctaaaggcgatcagtttgtttgactgcccctgatacaagtgagtgatccccaatgtggcacaacgatcttctaccagtttagcctttcgcccggtaatgatagcgacttcaatatcagaggtgagcgcacaacgaatgccataaccgtcacgaacattgaacgctttcagctcttcgccattattgcccatataaatcaggccatctgacagtacgccatcgacatcgaggatcagcagacgaatgttctctgcttttgctataacgtcggcgctgacagggccgtaacaggtcgcaagcgacgcacctgctttgctcattgttgtttatccttgaatctttacactacgcctgcacgcagtaaatcatgcatatgtaacacaccgagtaaatggtcgccatcggcaaccatcacggaggtgatatggcgggactgcattaagttcagtgcctcaacggccagaatgccagggcgcacacgtattccccccggcgtcatcacatcggcaatacttaactgacgaacatccacgcccatatcgaagacacggcgtaaatcaccgtcggtaaagatgccttcaatcatcatattgtcatcgcaaatgacagtcataccaagatttttgcgggtaacttccagcaacgcgtcacgcagactggccgttttcttaacatgcgggatctcatcgcccgtatgcataatatcgtttacgcgcagcagaagtttacgacccagtgcgccgcctgggtgtgagagcgcaaaatcttcagcagtaaagccgcgtgcttttaacagcgcgacagcgagggcatcgcccataaccagcgtggcggtggtgctgctggtcggtgccagccctaacggacaggcttctttcgctactttaacacacagatgcacatctgcggcgcgcgccatgctgctctccgggcgaccggtgatgcagattaacggtacgtgaagacgcttaagcactggaattaaggccgtgatttcgctggattcaccagagttagagatagcaatcaccacatcctgtggggtaaccatgcctaaatcaccatgcgcggcttcaccaggatggacgaaaaatgaaggtgtaccggtgctggcaaacgttgccgccatttttcgcccaatatgccccgattttcccatccccatgacgacaactttccctttacaccagaacatcttttcacaggcaagcgtgaaattctgattgatgtattgatcaagctccgccaggcattcacgttcaatcgccaggacttctttacctgcttgctgaaagtcaaaacccggttgtaactctacgtgcgacataatgcgtttccagttattcaacgagtattggcgataaccagtacaacatcgccagccatacgataaatccgccagttaataatacccctacaccacggcccggttgcggggagcgccgccagcacagcaacgcaaaaataatgctcaccagcaacatcacgctgtagtcacgactgtacgccagtggatcaatctctcctggcgttatcagcgcgggtaaacccaacacgatgacaatattaaaaatgtttgcgccaatgatatttccgacagcaatgtcgttttcacctttgcgaacccccgctattgcggttgccagttccggcaggctggttccgatagcaattgccgtcagacccatcgtcaactcgctgatggcaaagtaattcgccagcaccgtggcgttatcaaccaccatccgcgtggccactggcatgatgataagcgcaatgccgagccataaaaacgcgacgggcaatccgccgtcacgcggcagctctgcaagctgctctctggtcaggctgtcagtcccctgacgttcagcctgacgtgcaagtttaacaatgaacagcagccatagcacagccagaaagaggagaaagataccatcgctgcgactaagttgtccgtcatagagtacggaaccggccaccacgctgaccaacaacattaagggtaattcacggcgtagaacatcagaatggacggtaaaaggacgaaccagcgcagccagaccgaggatcagcaatatattgataatgtttgagccgagggctgtaccaacggctaaatcgcgttgttcgtgcagagacgcggcaagcgagacgatgacttctggtaacgatgtaccaatactgaccaccgtcatgccgatgatcagcggcgggatgccaaaggttcggcaaagaatagacgcggcaaaaaccaggcggtcggcactgtaaacgaccaaaagtaaaccaacaattaacagtgccgtagctaaaagcatctaacgtcctttcttcaggtatactcgccggtccgctgaagattttcagaaagccgtaacggatgcttaattttgactttatgcggctaaaaagtaaaacaaatgccagctttcgctaaccacggcgggtaatattctgtaaatatgttgggttcaaggttaaattgagcgccatgcttagaaaatcaacgcaagacgaagggtgaattatggagcagtctgtggcgaatttagtcgatatgcgcgatgtcagttttacgcgtggcaatcgctgcatcttcgataatatttccctgaccgtgccgcgagggaagatcacggcgatcatggggccatcgggcatcggtaaaacgacgctactccgtctgattggcgggcaaatcgcaccagatcatggtgagatccttttcgatggtgagaatattccggcgatgtctcgttcgcgcctgtatacagtgcgcaaacggatgagcatgttatttcagtccggggcgttgttcactgatatgaacgtatttgacaacgtcgcctatccactgcgcgaacatacccaacttcccgcgccattgttgcatagtacggtgatgatgaagctggaggccgtggggctgcgtggagcggctaaactaatgccttctgaactttccggtgggatggcgcggcgtgcagcgctggcgcgtgcgattgcgctggagccggatctcatcatgtttgatgaaccttttgttgggcaagatcccatcaccatgggcgtactggtgaagctgatttctgagctgaacagcgcgctgggcgtgacttgtgtggtggtttctcacgatgtgccggaagtgttaagtattgcggatcacgcctggatcctggcggacaaaaaaattgtcgctcatggcagtgcccaggcgttgcaggcgaatcctgatccgcgcgtacgtcagtttctggacgggatagctgacgggcctgttccgttccgctatcctgccggcgattatcacgctgatcttttaccagggagttaagccactcatgctgttaaatgcgctggcgtcgctcggacataaagggattaaaaccctgagaacgttcgggcgggccgggttaatgttattcaatgcgctggtcggcaaaccggaatttcgcaaacatgcgccgctgctggtgcgccagctctataatgtcggcgtcctgtcgatgctgattattgtggtttctggcgtgttcatcggaatggtgttggggctgcaaggttatctggttctgaccacttatagtgcggaaaccagtctgggtatgctggtggcgttatcgctactgcgtgaactggggccggtggttgccgcgttgttgtttgccgggcgtgctggttcggcgctaaccgcagaaatcggcctgatgcgcgctacagagcaactctccagtatggagatgatggcggtggatccgctgcgtcgggttatttctccccgtttctgggctggggttatttcattaccactgttgacggttattttcgtcgccgtggggatctggggcggatctctggtcggcgtcagttggaaaggcattgatagcgggttcttctggtcggcaatgcaaaatgccgtcgactggcgtatggatctggtcaactgtctgattaagagcgtggtgttcgccatcacggtgacgtggatttcgttgtttaacggctacgacgccatcccgacgtctgccgggattagccgggcaaccactcgcaccgttgtccactcgtctctggctgttctggggctggattttgtgctgaccgcattgatgtttgggaattgagttcatgcaaacgaaaaaaaatgaaatttgggtgggtatctttttattagcagcactgctggcggcgctgtttgtttgcctgaaggcggcgaacgtgacgtccatacgtactgaaccgacctacacgctttatgcgacgttcgataacattggcggcctgaaagcgcgctctccggtcagtattggtggcgttgttgtgggtcgggtggcggatattacgctggacccgaaaacctatctgccgcgcgtaacgctggaaattgaacaacgttataaccacattccagataccagttcgctgagcattcgtacttccggcctgctgggggaacaatatctggcattaaacgtcggttttgaagacccggaactggggactgctatcctgaaggatggcgatacaattcaggacactaagtctgcgatggtgctggaagatctcattggtcagttcctttacggtagtaaaggcgatgacaataagaatagtggcgatgcgccagctgctgcgccaggtaataatgaaaccactgaacctgtgggtacaacgaaataatttcaggagaaccgacgcatgtttaaacgtttaatgatggtcgctttgctggtgattgcacctctgagtgcggcaaccgcggcagaccagaccaatccgtataagctgatggacgaggcggcgcagaaaacgttcgatcgcctgaagaatgagcaaccgcaaattcgggccaacccggattatctgcgtaccattgttgatcaggaactgctgccatacgtacaggtgaaatacgccggtgcgctggtgctgggccagtattacaagagtgcgacccctgctcaacgtgaagcctactttgccgctttccgtgagtacctgaagcaggcttacggtcaggcgctggcgatgtatcacggtcaaacctatcagattgcgccagaacagccgctgggcgataaaaccattgtgcctattcgcgttaccattattgacccgaatggccgtccgccggtgcgtctggacttccagtggcgtaaaaactcccagacgggcaattggcaggcttacgacatgattgctgaaggcgtcagtatgatcaccaccaaacaaaacgagtggggaacgctgctgcgtaccaaaggtatcgacggcctgactgcgcaactgaaatcgatttctcaacagaaaatcactctggaagagaaaaaataatgagcgagtcactgagctggatgcagacgggtgacacgctggcgttatccggagagctggatcaggacgttttgctaccgctttgggaaatgcgtgaggaagcggtgaaggggattacctgcatcgatcttagccgtgtctcccgcgtggatacggggggactggcactgctgctccatcttatcgatctggcgaaaaagcagggcaacaatgtgacgcttcagggggtaaacgacaaagtgtataccctggcgaaattgtataatttgcctgctgatgttctgcctcgttaaattttttcaggccggatatggcgttaaccgcctgtccggcaaacctgcctgcaagtcgagccttgtctgatttatcagcgaggctttttgcttatttatgccagcgcaactttgctctaagatgtttcgctggtttattaactgatgattgaagatcccatggaaaataatgaaattcagagcgtgttgatgaacgctctctccctccaggaagtccacgtttccggcgatggcagccactttcaggttattgccgtgggtgagttgtttgacggcatgagtcgggttaaaaaacagcagacggtctatggtccgctgatggaatatattgcggataaccgcattcatgctgtgtcgatcaaagcgtatacccctgcggagtgggcgcgcgatcgcaaactgaacggcttttgagctatgggcgattcgccggtagcggatatgaattgttaactgagaacaaactaaatggataaatttcgtgttcaggggccaacgaagctccagggcgaagtcacaatttccggcgctaaaaatgctgctctgcctatcctttttgccgcactactggcggaagaaccggtagagatccagaacgtcccgaaactgaaagacgtcgatacatcaatgaagctgctaagccagctgggtgcgaaagtagaacgtaatggttctgtgcatattgatgcccgcgacgttaatgtattctgcgcaccttacgatctggttaaaaccatgcgtgcttctatctgggcgctggggccgctggtagcgcgctttggtcaggggcaagtttcactacctggcggttgtacgatcggtgcgcgtccggttgatctacacatttctggcctcgaacaattaggcgcgaccatcaaactggaagaaggttacgttaaagcttccgtcgatggtcgtttgaaaggtgcacatatcgtgatggataaagtcagcgttggcgcaacggtgaccatcatgtgtgctgcaaccctggcggaaggcaccacgattattgaaaacgcagcgcgtgaaccggaaatcgtcgataccgcgaacttcctgattacgctgggtgcgaaaattagcggtcagggcaccgatcgtatcgtcatcgaaggtgtggaacgtttaggcggcggtgtctatcgcgttctgccggatcgtatcgaaaccggtactttcctggtggcggcggcgatttctcgcggcaaaattatctgccgtaacgcgcagccagatactctcgacgccgtgctggcgaaactgcgtgacgctggagcggacatcgaagtcggcgaagactggattagcctggatatgcatggcaaacgtccgaaggctgttaacgtacgtaccgcgccgcatccggcattcccgaccgatatgcaggcccagttcacgctgttgaacctggtggcagaagggaccgggtttatcaccgaaacggtctttgaaaaccgctttatgcatgtgccagagctgagccgtatgggcgcgcacgccgaaatcgaaagcaataccgttatttgtcacggtgttgaaaaactttctggcgcacaggttatggcaaccgatctgcgtgcatcagcaagcctggtgctggctggctgtattgcggaagggacgacggtggttgatcgtatttatcacatcgatcgtggctacgaacgcattgaagacaaactgcgcgctttaggtgcaaatattgagcgtgtgaaaggcgaataatcgtctgagagctggcagccccgttcgcggggctaccgccagaccactcattttttcggtttagtgtagctacgcatcaactgcgttctgtcgataaactcatgggtctgcggatcatggtagcgtgatggccagataacccaagggtcagttcccagggctttcgcaataatcatctctcctttcggccatgggcgcgataatgcattcgccagcgttgaggaactcaaaccatttctgcgagattccgccgccattgacgttcccttcttgcgcaaacccgcaatgatgtcagcgggatgccagtcaatgaaattactttccatttttcctcactccttaagttagtcgctttcattcagaacacttcttctgtcgagcatcactatactcctgatggcctattgctctaaaaagttcctgtaaagagtgtgaatattcagaatatataaagatgcacatccctatttttcaggtgttatagagctgaataagtgtttttatggaacttactggaaccatcccgcgcgctgcgcgggatgaggggaggggattaacgatcgcgttgaacagcgatgtgcgcgaggccgatgagtgcttctcgccaaggggtgtccgggagcacctgtaacgctgcgatggctttgtctgcttcttcctcggcacgctgacgcgtccattcaagagatccacaagcgttcattgcttccagaaccggttccagaagatggcgaccgttaccctgttcgatggcggtacggatcatctgtgcctgttctggtgtgccatgatgcatcgcatgcagcagcggcagcgtcggtttaccttcgttcagatcgtcgccgacatttttacctaactgttcgccatcggcattgtaatcgagtaaatcgtcgatcaactggaaagcagtgccgagatagcgcccataatcctgcaggcctttctcctcctccggcgtacagccagccagaatcccggaacactgcgcggcagcctcaaacagacgcgcggttttgctatagataacgcgcatgtagttttcttcagtgatgtccggatcgttaacgttcatcagttgcagaacttcaccttctgcgatgacgtttacggcttctgacatgacttccagcactttgagcgaaccgaggctggtcatcatctggaaagcgcgggtataaataaaatcgcctaccagcacgctggcggcattgccaaatgcggcgttggcggtagctttacccctgcgcatatctgattcatccacaacgtcgtcgtgtagcagagtcgccgtgtggataaactcgatcagggcagcaatggtgacatgcgcatttccctcatagccaacagctcgtgcagccagtacagcaatcatcggacgaatacgtttaccgccgccgctgacgatgtaatagcctaactgattgatcagttggacgtcggaattaagctgctcaaggattgccgcattaacacccgccatatcttgcgcggttaactcattgattttttctaaattcatcgcaaaagccgggcttttcgccccgattaccttactgtgaacaaaggcaacttagggtttatggttaggaatatagggtgattgtactgaaaaaatggcacagataaacgttaccgtacaagttgtgttttttttcttcgtgtattgactgtagcacttgtcaaaggcgtgcgttttgcgtaatattcgcgccctattgtgaatatttatagcgcactctgaatcattgaaaaggtgtgcgcggaagcggagttttatatgtacgcggttttccaaagtggtggtaaacaacaccgagtaagcgaaggtcagaccgttcgcctggaaaagctggacatcgcaactggcgaaactgttgagttcgctgaagtgctgatgatcgcaaacggtgaagaagtcaaaatcggcgttcctttcgttgatggcggcgtaatcaaagctgaagttgttgctcacggtcgtggcgagaaagttaaaatcgttaagtttcgtcgtcgtaaacactatcgtaagcagcagggccatcgtcagtggttcactgatgtgaaaattactggcatcagcgcctaagacctgaggagagatttcaaatggcacataaaaaggctggcggctccacacgtaacggtcgcgattcagaagctaaacgcctgggcgttaagcgtttcggtggcgaatccgttctggcgggtagcatcatcgttcgtcaacgtggtaccaaattccacgctggcgctaacgtaggttgcggtcgtgaccacactctgtttgctaaagcagacggtaaagtgaaattcgaagttaaaggcccgaaaaaccgtaaatttatcagcatcgaagctgaataagtttttcgcgtcccggtaacggatgaaagccccgcaacacgttgcggggctttttacattcgataaccggtaaaaatgcgcatggtgcgacgttaatccgcaaatgcgctttgcagggaatacggtatgaagcagcaggcaggcattggcattcttttggcgctcaccacagcaatttgctggggggcgttgccaatcgcaatgaagcaggtgctggaggtgatggaacctccgacaatcgtgttttaccgtttcttgatggcgagtattggcctgggtgccattcttgcggtgaagaagaggttgccgccattacgcgtgtttcgtaagccacgctggttgattttgttggcagtggcgaccgccgggctgtttgggaacttcatcctgttcagctcatccttgcaatacctgagtccgaccgcttcgcaggtgattgggcaactctcgccagttggcatgatggttgccagcgtatttatcctcaaagagaaaatgcgcagcactcaggttgtaggggcattgatgctcctgagcggcctggtgatgttttttaacaccagtctggtcgagatatttacaaagctcaccgattacacctggggagttatctttggggtcggtgcggcgacggtttgggtgagttatggcgtggcgcaaaaggttttattgcgtcggctggcctcaccgcagatcctgtttttactgtacactttatgtacaattgcgctcttccctctggcaaagcctggagtgatagcgcagcttagccactggcagctcgcatgtttaattttttgcggactgaataccttggtaggatatggcgccctggcggaagcgatggctcgctggcaggcagcgcaggtgagcgcgatcatcacgctcaccccactgtttacgctgtttttttcagatcttttatcactggcctggcccgatttcttcgccagaccgatgttaaaccttttaggttatctcggtgcgtttgtcgtggttgcgggcgcgatgtattccgccattggtcatcgtatttggggcggattacgtaagcatacaacggtggtatcgcaaccccgcgcaggcgaatgatttacggagaataaaatgaagtttgttgatgaagcatcgattctggtcgttgcaggtgatggcggtaatggttgcgtgagcttccgccgcgaaaagtatattccgaaaggcggcccggatggcggcgacggcggtgatggtggtgacgtatggatggaagccgacgagaacctgaacacgcttatcgattatcgttttgaaaaatctttccgtgcagagcgcggtcagaatggcgcaagccgcgactgtaccggtaagcgcggtaaagacgtgacgattaaagtgccggtaggtacgcgtgtaatcgaccagggtactggtgaaaccatgggcgatatgaccaaacacggtcagcgtctgctggttgctaagggcggctggcacggtctgggcaatacccgtttcaaatcgtccgttaaccgtacaccgcggcagaaaaccaacggcacgccgggcgataagcgcgagctgctgctggagctgatgctgctggctgacgtcggtatgttggggatgccaaacgcgggtaaatcgacctttattcgtgcggtatcggcggctaaaccgaaagtggcggattatccgtttaccactctggtgccaagtctgggtgtggtacgaatggacaacgaaaagagcttcgttgttgccgatattccaggactgattgaaggcgctgcggaaggcgcaggtctgggcattcgcttcctgaagcacctggaacgttgccgcgtcctgttgcacctcatcgatatcgatccgattgacggcaccgatccggttgaaaacgcgcgtattattatcagcgagctggaaaaatacagccaggatctggcgacgaaaccgcgttggttagtgttcaacaagatcgatctgctggataaggtagaagccgaagagaaagcgaaagcgatcgctgaggcgctgggctgggaagataaatattatctgatctctgcggcgagtggactgggcgtgaaagatctctgctgggatgtgatgacctttatcattgaaaacccggtcgtgcaggctgaagaagcgaaacagccagagaaagtcgaattcatgtgggatgattatcatcgccagcagcttgaagagattgctgaagaggatgatgaagactgggatgacgactgggacgaagacgacgaagaaggcgttgagttcatttacaagcgttaatcactgatgataaacgccaaatcagcctgatgcgctacgcttatcaggcctacaagagaattgcaatatgttgaatttgcacgattttgtaggccggataaggcgtttacgccgcatccggcataaacaaagcgcactttgtcaataatctgaagccccggccatgtgccggggtttctttttgactaattgttctgataaatatctttatacaaacggctttcaaaacgcactaacggaatacggcgattacgctgatccgcaggttctactgcatagccagaaagatattgcacaaacgccattcgttgcccgctcgctgtggtaatgaatcccgccaggttatataccccctgcaacgaaccggttttcgctgagacttttccatccacgcccgcctgatgcagacctgcacggtactgcaaagagccgtcatagcccgccagcggcagcatggagataaagttaagttcattgtcgtgttgggcaatgtattgcagcacctgcatcatggtggcgggggcaatcaggttatgccgcgaaagccctgaaccatcggcaataatggtgtttccaatatcgacaccggcttgctggcgcaggatctgacgcacggcgtccgacccggcccgccatgttccaggcacattgaagcgcgcatggcctatcatgcggaaaaccgtatcggcgatcatgttgtccgactttttcagcataatcttaagcagatcgtgcagcggggccgactgtttactggcaactaccgttccaggttcgttaacctgagtctggcgcagcagtgttccgctccaggtgatacccgcctgttttaactcatctttcagaattgcaccggcatagctggctccatcctgcacggcaaaagccaacgggagcggctcagaacgttgtggcaggcatcccgtcagcgtaaagcggttcaggtcgcctggcaccacatccagttcgcagtattgcgcttcggcagaaccacgggggagggtgcgtacctggctgaacatcgtaacggggtaataagatgccacgcgtataaaagccatatcaccaggctttggggcactgtagagcgagacggagaaacagttgcggtcaactatggcggcggcaggcggagcgctaaagcattgtgtcatgtcattccatggccagccgggggctttatcgtggctggcgaaaatggaggtatctatcaacacattgccatcgatttggttgacgccagattttttcaaagtcgcgaccatattgcgaatatcctgacgttttaacgtcggatcggcaccaaatcgcgccactaagtcacccttaagtacgccgttttccacattgcctttggtttcaagcgtcgtggtaaaacgaaaatcggggccgagttgaatcaacgccgccagcgcagtaatcactttctgggtactggcaggcagcgccatctgctgactgtggtaatcaatagcgggggccgacgcgccgactttttgcaccatcagggcaaggttggcaccagcggggagttgagtaatgtactcatcaacatttgcggcctgaacactgaacgctatacagctggtcaatccgatgataaatctggaaaatcgcataatctcgcgctaacaacctggaatcgagccgtcatactacggcgcaacgccctataaagtaaacgatgacccttcgggaacttcagggtaaaatgactatcaaaatgtgaattgtagctgacctgggacttgtacccgggtcggtatttttttgcttctggtcccggtaaggagttatgccgggcaggccgaacagccggggtgggtgaagacttgccctatcaggaatattcaagaggtataacaaatgcaagctattccgatgaccttacgcggcgctgaaaaattacgcgaagagctggattttctgaaatctgtgcgccgtcctgaaatcattgctgctatcgcggaagcgcgtgagcatggcgacctgaaagaaaacgccgaataccacgcagctcgtgaacagcagggtttctgcgaaggccgtattaaagacatcgaagccaagctgtcgaacgcgcaggtgattgatgtcaccaaaatgcccaacaatgggcgcgttatttttggtgctaccgtaacggtgctgaatctggattctgacgaagaacagacttatcgcatcgttggcgatgacgaagctgactttaaacaaaacctgatttctgtaaactcgcctattgctcgtggcctgatcggcaaagaagaagatgatgttgtggtcatcaaaacgccgggcggcgaagtagaatttgaagtaattaaggtggaatacctgtaagaattacccaatactcaagatgttgatgtattgtaaagaaaggaaaaaggccgctatgcggccttttatcaacgaacagagcgtggcattttgctctcctgcctgcggaaaacccctcgttttacacagcaaatgtgtgtaactttaggataatcttagcgtggcagcgagattttacgttctttagttgggcgataaagcaccagcgttttaccgatgacctgtacattacaggcgccggtttcgcgcacgatagcttccacgatcaaggttttagtttcgcgatcttcggtggcgattttcaccttgatgagttcatggtgctctaacgcttgttcaatctcggccagcaccccttcggtcaaaccattactgccaagcagaacaactggcttgagcggatgtgccagacctttcaggtgctgtttttgtttagtactcagattcatcgtattttttgcttacgttgggattgaaaacgggtcattctaccgccatctcccatatatcaccaaataggcgcgtaaaaatttacgcaattggttacgatgagttatccccatgggaaagttaaatgacaggtaagaagcgttctgccagctccagccgctggcttcaggaacactttagcgataaatatgttcaacaggcacagaaaaaggggttacgttcccgtgcctggtttaaacttgatgaaatacagcaaagtgacaaactctttaaaccgggaatgacggttgtcgaccttggtgctgctccgggtggttggtcacaatatgtggtcacccaaattggcggcaaaggccgcatcatcgcttgcgatcttttacctatggatcctatcgttggtgtggactttcttcagggcgattttcgtgatgaactggtgatgaaagcactgctggagcgcgttggcgacagcaaagtccaggttgtcatgtccgatatggcaccaaacatgagcggaacaccggcggtggatatcccccgtgccatgtatctggtggaactggcgctagaaatgtgtcgtgatgtattagcgccaggtggcagttttgtagtgaaggtgttccagggcgaaggtttcgatgagtatctaagggaaattcgctccctgtttacgaaggtcaaagttcgtaagccggactcttctcgtgcacgttcgcgggaagtgtatattgtagcgaccgggcgtaaaccctaaccgggagatttcagacgaaagtttgaaagatgctggatatagagtatcctgacgctgtttttaacacagttgtaataagaggttaatcccttgagtgacatggcgaaaaacctaatactctggctggtcattgccgttgtgctgatgtcagtattccagagctttgggcccagcgagtctaatggccgtaaggtggattactctaccttcctacaagaggtcaataacgaccaggttcgtgaagcgcgtatcaacggacgtgaaatcaacgttaccaagaaagatagtaaccgttataccacttacattccggttcaggatccgaaattactggataacctgttgaccaagaacgtcaaggttgtcggtgaaccgcctgaagaaccaagcctgctggcttctatcttcatctcctggttcccgatgctgttgctgattggtgtctggatcttcttcatgcgtcaaatgcagggcggcggtggcaaaggtgccatgtcgtttggtaagagcaaagcgcgcatgctgacggaagatcagatcaaaacgacctttgctgacgttgcgggctgcgacgaagcaaaagaagaagttgctgaactggttgagtatctgcgcgagccgagccgcttccagaaactcggcggtaagatcccgaaaggcgtcttgatggtcggtcctccgggtaccggtaaaacgctgctggcgaaagcgattgcaggcgaagcgaaagttccgttctttactatctccggttctgacttcgtagaaatgttcgtcggtgtgggtgcatcccgtgttcgtgacatgttcgaacaggcgaagaaagcggcaccgtgcatcatctttatcgatgaaatcgacgccgtaggccgccagcgtggcgctggtctgggcggtggtcacgatgaacgtgaacagactctgaaccagatgctggttgagatggatggcttcgaaggtaacgaaggtatcatcgttatcgccgcgactaaccgtccggacgttctcgacccggccctgctgcgtcctggccgtttcgaccgtcaggttgtggtcggcttgccagatgttcgcggtcgtgagcagatcctgaaagttcacatgcgtcgcgtaccattggcacccgatatcgacgcggcaatcattgcccgtggtactcctggtttctccggtgctgacctggcgaacctggtgaacgaagcggcactgttcgctgctcgtggcaacaaacgcgttgtgtcgatggttgagttcgagaaagcgaaagacaaaatcatgatgggtgcggaacgtcgctccatggtgatgacggaagcgcagaaagaatcgacggcttaccacgaagcgggtcatgcgattatcggtcgcctggtgccggaacacgatccggtgcacaaagtgacgattatcccacgcggtcgtgcgctgggtgtgactttcttcttgcctgagggcgacgcaatcagcgccagccgtcagaaactggaaagccagatttctacgctgtacggtggtcgtctggcagaagagatcatctacgggccggaacatgtatctaccggtgcgtccaacgatattaaagttgcgaccaacctggcacgtaacatggtgactcagtggggcttctctgagaaattgggtccactgctgtacgcggaagaagaaggtgaagtgttcctcggccgtagcgtagcgaaagcgaaacatatgtccgatgaaactgcacgtatcatcgaccaggaagtgaaagcactgattgagcgtaactataatcgtgcgcgtcagcttctgaccgacaatatggatattctgcatgcgatgaaagatgctctcatgaaatatgagactatcgacgcaccgcagattgatgacctgatggcacgtcgcgatgtacgtccgccagcgggctgggaagaaccaggcgcttctaacaattctggcgacaatggtagtccaaaggctcctcgtccggttgatgaaccgcgtacgccgaacccgggtaacaccatgtcagagcagttaggcgacaagtaagttcccgcatcagatgactgtatttgtaccgaaaaccccggggcgtgctccggggttttttcttatcaattcataccagggataacatcatgaaactctttgcccagggtacttcactggaccttagccatcctcacgtaatggggatcctcaacgtcacgcctgattccttttcggatggtggcacgcataactcgctgatagatgcggtgaaacatgcgaatctgatgatcaacgctggcgcgacgatcattgacgttggtggcgagtccacgcgcccaggggcggcggaagttagcgttgaagaagagttgcaacgtgttattcctgtggttgaggcaattgctcaacgcttcgaagtctggatctcagtcgatacatccaaaccagaagtcatccgtgagtcagcgaaagttggcgctcacattattaatgatatccgctccctttccgaacctggcgctctggaggcggctgcagaaaccggtttaccggtttgtctgatgcatatgcagggaaatccaaaaaccatgcaggaagctccgaagtatgacgatgtctttgcagaagtgaatcgctactttattgagcaaatagcacgttgcgagcaggcgggtatcgcaaaagagaaattgttgctcgaccccggattcggtttcggtaaaaatctctcccataactattcattactggcgcgcctggctgaatttcaccatttcaacctgccgctgttggtgggtatgtcacgaaaatcgatgattgggcagctgctgaacgtggggccgtccgagcgcctgagcggtagtctggcctgtgcggtcattgccgcaatgcaaggcgcgcacatcattcgtgttcatgacgtcaaagaaaccgtagaagcgatgcgggtggtggaagccactctgtctgcaaaggaaaacaaacgctatgagtaatcgtaaatatttcggtaccgatgggattcgtggtcgtgtaggggatgcgccgatcacacctgattttgtgcttaagctgggttgggccgcgggtaaagtgctggcgcgccacggctcccgtaagattattattggtaaagacacgcgtatttctggctatatgctggagtcagcactggaagcgggtctggcggcagcgggcctttccgcactcttcactggcccgatgccaacaccggccgtggcttatctgacgcgtaccttccgcgcagaggccggaattgtgatatctgcatcgcataacccgttctacgataatggcattaaattcttctctatcgacggcaccaaactgccggatgcggtagaagaggccatcgaagcggaaatggaaaaggagatcagctgcgttgattcggcagaactgggtaaagccagccgtatcgttgatgccgcgggtcgctatatcgagttttgcaaagccacgttcccgaacgaacttagcctcagtgaactgaagattgtggtggattgtgcaaacggtgcgacttatcacatcgcgccgaacgtgctgcgcgaactgggggcgaacgttatcgctatcggttgtgagccaaacggtgtaaacatcaatgccgaagtgggggctaccgacgttcgcgcgctccaggctcgtgtgctggctgaaaaagcggatctcggtattgccttcgacggcgatggcgatcgcgtgattatggttgaccatgaaggcaataaagtcgatggcgatcagatcatgtatatcatcgcgcgtgaaggtcttcgtcagggccagctgcgtggtggcgctgtgggtacattgatgagcaacatggggcttgaactggcgctgaaacagttaggaattccatttgcgcgcgcgaaagtgggtgaccgctacgtactggaaaaaatgcaggagaaaggctggcgtatcggtgcagagaattccggtcatgtgatcctgctggataaaactactaccggtgacggcatcgttgctggcttgcaggtgctggcggcgatggcacgtaaccatatgagcctgcacgacctttgcagcggcatgaaaatgttcccgcagattctggttaacgtacgttacaccgcaggtagcggcgatccacttgagcatgagtcagttaaagccgtgaccgcagaggttgaagctgcgctgggcaaccgtggacgcgtgttgctgcgtaaatccggcaccgaaccgttaattcgcgtgatggtggaaggcgaagacgaagcgcaggtgactgaatttgcacaccgcatcgccgatgcagtaaaagccgtttaaagcgttagataactggctaaaaaggcggcgattgtcgccttttttctcagcgaacacatcggttttgctgtttttttccgcagttgatacaatgcgataaaattgcccttgcgaaggtcattcgctttggttagtattcacacccgcttcagtgggaaagattaaaaactcccgctttattggttgaagcattggtacgcggcaactccgcaaggaacaggttgattatgtatgaagctcttttagtagttttccttattgtggcaattggccttgttggtctgatcatgctgcagcaaggtaaaggcgctgatatgggagcctccttcggagcaggcgcttccgctacgctgtttggttcaagtggttctggtaacttcatgacccgcatgacggcgctgctggcaacgttattcttcatcatcagtctggtgctgggtaacatcaatagcaacaaaaccaataaaggtagcgaatgggaaaatctgagtgcaccggcgaaaaccgaacaaactcagccagctgctccggctaagccgaccagcgatatcccgaactaaaaagtagtatccgtgccgaggtggtggaattggtagacacgctaccttgaggtggtagtgcccaatagggcttacgggttcaagtcccgtcctcggtaccaaattccagaaaagagacgctgaaaagcgtcttttttcgttttggtcctggtctgaggaatggttgtcaggtatctgtatctcgtccagttgctttactcgtagctggtaccttgaaacgatggtgccggtacgccttagttataaatttttcccttctactgacataattggcactttattgtgtcaactccagttccggtacgaatacggatatgtttacttctcgataaaccatcctgctcctgtcagtataacgactgatggctacgttctgcgtaatgtttagagacgcattgataatgttatttaattactgagaacgcaatggccgcatcatttaaaaagaaaaaactaacagtgtttcgttctgatatggatcagagttgaaaaacatgtctgatataaaattaaacattgttgataattgtttatattggttgtgaacttggatttctggatgacagtattcaacaaatttgctagaacttttaaatctcattggttgttgtatctttgtgttattgtttttggtattacgaacttagtcgcttcttccggagcgcatatggttcagcgcttgctgttcttcgttctgaccatcctggttgtaaaacgtatatcatcccttccgcttcgcctgcttgttgccgcaccatttgtgttactgactgcggcagacatgagtattagcctctattcatggtgtacctttggtacaactttcaatgatggatttgcgattagtgtgctccagagtgatccggatgaagttgtcaaaatgctggggatgtatatcccttatctatgtgcctttgcttttttatcccttctttttttggcagtaataataaaatatgatgtttccttgccgacaaaaaaagtgacaggaatattattgctgattgtcatttcgggcagtttattttccgcttgtcaatttgcttataaagatgcaaaaaataaaaaagcgttcagtccatatatactagcgtcgcgatttgctacctatacgccgtttttcaatctcaactattttgctttagcagcgaaagagcatcaaagattactctcaattgcaaacacggtgccgtattttcaattatcagtcagggatacaggtattgatacctacgtgttgattgtgggggagtctgtacgtgtcgacaatatgtctttgtatggatatacacgctctacgacaccgcaagttgaagcacaaagaaaacagatcaaactgtttaatcaagcaataagcggcgcaccttacactgcgctgtcggttcccctttctttaactgctgattctgttttgagtcatgacattcataattaccccgacaacattattaatatggctaatcaagcaggatttcagactttctggctaagctcgcaatccgcttttcggcagaatggtacagcagttaccagtatcgccatgcgcgccatggaaacagtttatgtcagaggatttgatgaattgttgttgccgcatttatcgcaagcattacagcaaaatacgcagcaaaagaaactgattgttcttcatttaaatggaagccatgaaccggcttgtagcgcctatccgcaatccagcgccgtgtttcaaccgcaggacgatcaggatgcctgctatgacaactccattcattacacagatagtttgctaggtcaggtttttgaattattaaaagatcgccgcgcctcggtcatgtattttgccgaccacggcctggaacgtgaccctacgaagaagaacgtctattttcatggaggcagggaggctagccagcaggcatatcatgtcccgatgtttatctggtatagccccgttcttggggatggcgtggatcgcacaacggaaaacaacatcttttcgacagcttacaataattaccttattaatgcgtggatgggggtaacaaagccggaacagccgcaaacgcttgaggaagtgattgcacactataaaggagactcacgggttgtggatgcaaaccatgatgttttcgattatgtgatgctcagaaaggagtttacagaggataagcaaggtaaccccacccctgaagggcagggttgatgtcgaattactggcctttgttttccagattctccacctgcggcacgcctgaagcggcagaggaggaaagcaggccagttttggcataaccgaaaagtttctcgcgggtatcagtgatatccaggttacgcatggtcaattgaccaatacgatcatctggcgagaacaccgagtcgcctttttccatcgtcagacgctctggcttgtaggtcaggttctctgagacggtattcaggattgaataatcgttcccacggcgcagctccagggtaacttcaccagtgatctggctggcaacccagcgttgcagagagtcacgcagcatcagcgcctgggagtcaaaccaacgcccctggtacagcagacggcccaactgacgaccatgcgcgtgatactgctcaatggtgtcttcgttgtgaataccggtcaacaggcgttcatacgcaatgtgcagcagtgccatccccggagcttcgtaaataccacggcttttcgcttcgatgatacggttttcaatctggtcgctcatgcccaggccgtgacgaccgccgatgcggttagcttccagcatcatttctacgtcgtcgctaaaggttttaccgttcagcgccaccggatgaccttgttcaaagcgtactgtgacttcttctgccgggatcttcacgctctcatcccagaatttcacgcccataatcgggttgacgattttgacgctggagttgaggtattccagatccttcgcttcatgcgttgcaccaagcatgttggagtctgtggagtaggctttttcgacagacattttgtagtcgaaaccgcaggcaatcataaattcagacatctcatgacggccgcccagttcatcaataaagtcagtatcaagccacggtttgtaaatctgcagttcagcattggtcagcagaccataacgatagaaacgttcgatatcgtttcctttgtaggtgctaccgtcaccccagatattcacgccatcttctttcatcgcagcaaccagcatggtaccagtcacggcgcggcccagcggcgtcgtgttgaaataggtcaggccgccggtggtgttatgaaatgcgccacactgaatagcggcaataccttcggccaccagttgtttgcggcagtcgatcagacgtgcgttctccgcgccgtattccatggcacgacgagggatcgcatcataatcctcttcgtctggctggcccaggtttgcagtatatgcataaggaaccgctcccttttgtcgcatccacagcagtgcggcactggtgtccagaccgccagaaaaagcgataccaatacgttgacctaccgggagatgcttgagaatcgtcgtcataaaataacaccctgcttaattaactgatgatgagcctggatttccgctctcactgaatttttatgcaaaataaatgagttttcatttaatcatcttttatcggagacaggaagagtttagtgtgttttttgtaaaataatgcgcttaagggagagcaggagaaggcaaaagtattcaacaaatgaaagtgaactggatattcattcacatgattagcaataaacgttgacaaaatgtggcgtggatcactataatgcctgcagattttacgtcccgtctcggtacaccaaatcccagcagtatttgcattttttacccaaaacgagtagaatttgccacgtttcaggcgcggggtggagcagcctggtagctcgtcgggctcataacccgaaggtcgtcggttcaaatccggcccccgcaaccactttcccttagagtcctttttcaaatatactgtgaagacttcggccttcgtagtgggatttgaaaaaatccttctggaaagtgctccagaccgcagttgcggttatagggttcagttatataaagccccgatttatcggggttttttgttatctgactacagaataactgggctttaggccctttttttatgtcttgggggtgggcttgtccacattagagcaaaaattaacagagatgattactgcgccagttgaggccctgggttttgaactggttggcatcgaatttattcgcggtcgcacatccacactgcgcatctatattgatagtgaagatggcatcaatgttgatgattgtgctgatgtgagccaccaggtaagtgctgtgctggatgttgaagatcccatcaccgttgcttataacctggaagtctcctcaccgggtctcgatcgcccactgttcacggctgaacactacgcccgttttgtcggagaagaggtgactctggttctccgtatggcggtacaaaaccgtcgtaaatggcagggcgttatcaaagcggtagacggtgaaatgatcacagttaccgtcgaaggtaaagatgaagtgttcgcgctgagtaatatccagaaggcgaacctggttccccacttttaatagtctggatgaggtgaaaagcccgcgatgaacaaagaaattttggctgtagttgaagccgtatccaatgaaaaggcgctacctcgcgagaagattttcgaagcattggaaagcgcgctggcgacagcaacaaagaaaaaatatgaacaagagatcgacgtccgcgtacagatcgatcgcaaaagcggtgattttgacactttccgtcgctggttagttgttgatgaagtcacccagccgaccaaggaaatcacccttgaagccgcacgttatgaagatgaaagcctgaacctgggcgattacgttgaagatcagattgagtctgttacctttgaccgtatcactacccagacggcaaaacaggttatcgtgcagaaagtgcgtgaagccgaacgtgcgatggtggttgatcagttccgtgaacacgaaggtgaaatcatcaccggcgtggtgaaaaaagtaaaccgcgacaacatctctctggatctgggcaacaacgctgaagccgtgatcctgcgcgaagatatgctgccgcgtgaaaacttccgccctggcgaccgcgttcgtggcgtgctctattccgttcgcccggaagcgcgtggcgcgcaactgttcgtcactcgttccaagccggaaatgctgatcgaactgttccgtattgaagtgccagaaatcggcgaagaagtgattgaaattaaagcagcggctcgcgatccgggttctcgtgcgaaaatcgcggtgaaaaccaacgataaacgtatcgatccggtaggtgcttgcgtaggtatgcgtggcgcgcgtgttcaggcggtgtctactgaactgggtggcgagcgtatcgatatcgtcctgtgggatgataacccggcgcagttcgtgattaacgcaatggcaccggcagacgttgcttctatcgtggtggatgaagataaacacaccatggatatcgccgttgaagccggtaacctggcgcaggcgattggccgtaacggtcagaacgtgcgtctggcttcgcagctgagcggttgggaactcaacgtgatgaccgttgacgacctgcaggctaagcatcaggcggaagcgcacgcagcgatcgacaccttcaccaaatatctcgacatcgacgaagacttcgcgactgttctggtagaagaaggcttctcgacgctggaagaactggcctatgtgccgatgaaagagctgttggaaatcgaaggccttgatgagccgaccgttgaagcactgcgcgagcgtgctaaaaatgcactggccaccattgcacaggcccaggaagaaagcctcggtgataacaaaccggctgacgatctgctgaaccttgaaggggtagatcgtgatttggcattcaaactggccgcccgtggcgtttgtacgctggaagatctcgccgaacagggcattgatgatctggctgatatcgaagggttgaccgacgaaaaagccggagcactgattatggctgcccgtaatatttgctggttcggtgacgaagcgtaataaactgtagcaggaaggaacagcatgacagatgtaacgattaaaacgctggccgcagagcgacagacctccgtggaacgcctggtacagcaatttgctgatgcaggtatccggaagtctgctgacgactctgtgtctgcacaagagaaacagactttgattgaccacctgaatcagaaaaattcaggcccggacaaattgacgctgcaacgtaaaacacgcagcacccttaacattcctggtaccggtggaaaaagcaaatcggtacaaatcgaagtccgcaagaaacgcacctttgtgaaacgcgatccgcaagaggctgaacgccttgcagcggaagagcaagcgcagcgtgaagcggaagagcaagcccgtcgtgaggcagaagaatcggctaaacgcgaggcgcaacaaaaagctgaacgtgaggccgcagaacaagctaagcgtgaagctgctgaacaagcgaaacgtgaagctgcggaaaaagacaaagtgagcaatcaacaagacgatatgactaaaaacgcccaggctgaaaaagcccgccgtgagcaggaagctgcagagctcaagcgtaaagctgaagaagaagcgcgtcgtaaactcgaagaagaagcacgtcgcgttgctgaagaagcacgtcgtatggcggaagaaaacaaatggactgataacgcggaaccgactgaagattccagcgattatcacgtcactacttctcaacatgctcgccaggcagaagacgaaagcgatcgtgaagtcgaaggcggccgtggccgtggtcgtaacgcgaaagcagcgcgtccgaagaaaggcaacaaacacgctgaatcaaaagctgatcgtgaagaagcacgcgcagcagtacgtggcggtaaaggcggaaaacgtaaaggttcttcgctgcagcaaggcttccagaagcctgctcaggccgttaaccgtgacgttgtgatcggcgaaactatcaccgttggcgaactggcgaacaagatggcggttaaaggctctcaggtcatcaaagcgatgatgaaactgggcgcaatggcaaccatcaaccaggttatcgatcaggaaaccgcacagctggttgctgaagagatgggccataaagttatcctgcgtcgtgaaaacgagctggaagaggcggtaatgagcgaccgtgacacgggtgctgcggctgaaccgcgcgcgccggttgtgaccatcatgggtcacgttgaccacggtaaaacctctctgctggactacattcgttcaacgaaagtggcctctggcgaagcgggcggcattacccagcacattggtgcataccacgttgaaactgaaaacggcatgatcaccttcctggacaccccggggcacgccgcgtttacttcaatgcgtgctcgtggtgcgcaggcaacggacatcgtagtcctggttgttgctgccgacgacggtgtgatgccgcagaccatcgaagcaatccagcacgcgaaagcggcgcaggtaccggtggtggttgcagtgaacaagatcgataaaccagaagctgatccggatcgcgttaagaacgaactctcccagtacggcatcctgccggaagagtggggcggtgaaagccagttcgtacacgtatctgcgaaagcgggtaccggtatcgatgaactgctggacgctatcctgctgcaggcggaagttctggagctgaaagcggtacgtaaaggtatggcgagcggtgcggttatcgaatccttcctcgataaaggtcgtggtccggttgctaccgttctggtacgtgaaggtactctgcacaagggcgatatcgttctgtgtggcttcgaatacggtcgtgttcgtgcgatgcgtaacgaactgggtcaggaagtgctggaagcgggtccgtccattccggtggaaatcctcggcctgtccggcgtaccggctgcgggtgatgaagttaccgttgtacgtgacgagaagaaagcgcgtgaagttgcactctatcgtcagggtaaattccgcgaagttaaactggcgcgtcagcagaaatctaaactcgagaacatgttcgccaacatgaccgaaggcgaagttcacgaagtgaatatcgtcctgaaggcagacgtacagggttctgtcgaagcgatctccgactccttgctgaaactgtctactgacgaagttaaagtgaagatcatcggttctggcgtaggtggtatcaccgaaaccgacgccaccctggctgcggcgtccaacgccatcctggttggctttaacgtacgtgctgatgcctctgcacgtaaagtgattgaagcggaaagcctggatctgcgttactactccgtcatctataacctgattgacgaagtgaaagcggcgatgagcggtatgctgtctccggaactgaaacagcagattatcggtctggcggaagttcgtgacgtgttcaaatcgccgaaatttggtgccatcgcaggctgtatggttaccgaaggtgtggttaaacgtcacaacccgatccgcgttctgcgtgacaacgtggttatctacgaaggcgagctggagtccctgcgccgcttcaaagatgacgttaacgaagtccgtaacggtatggaatgtggtatcggcgttaagaactacaacgacgtccgcactggcgatgtgatcgaagtattcgaaatcatcgagatccaacgtaccattgcttaaggtttttagggttccatgcgggataaggcgtttacgctgcatccggcatggattgcctgatgtgacgctggcgcgtcttatcaggtcaacgtgaacagcccttccacctgaaattaattttaaaaaggggctaacagccccttttttgtcaggagaatttattatggcgaaagaatttggtcgcccgcagcgcgtagcgcaggaaatgcaaaaagagatcgctctcatcctgcagcgtgaaattaaagatcctcgcctgggcatgatgaccaccgtttccggtgtcgaaatgtctcgcgacctggcgtatgccaaagtatatgtgacgttcctcaacgacaaagatgaagacgcggttaaagcgggcatcaaagcgttgcaagaagcttctggtttcatccgcagcctgctggggaaagcgatgcgcctgcgtatcgtgccggaactgaccttcttctacgacaactctctggttgaagggatgcgcatgtcaaacctggtgaccagcgtggtcaaacatgacgaagaacgtcgtgttaacccggacgacagcaaggaggactaatgagtcgtcctcgtcgtcgcggtcgcgacattaacggcgttttgttgctggataaacctcagggtatgtccagcaacgatgcgctgcaaaaagtgaaacgtatatataacgccaaccgtgccgggcataccggtgcgctggacccgctggcgaccggcatgttgccgatttgcctcggggaagcgacgaagttttcccagtatctgctggactccgacaaacgctatcgggtcattgcgcgtcttggacagcgtaccgatacttctgatgccgacggacagatcgttgaagaacgtccggtaacctttagcgcagagcagctggcagcggcactggatactttccgtggcgatatcgaacagatcccttcgatgtattcagcactgaaatatcagggcaaaaaactgtacgaatatgcgcgtcagggcattgaagttccgcgtgaagcgcgtccgattaccgtttatgaattgctgtttattcgccatgaaggcaatgagctggagctggaaattcactgctcaaaaggcacttatatccgcaccatcattgatgacctgggtgaaaaactcggctgtggcgcgcatgttatttacctgcgccgtctggcggtaagtaaatatccggttgaacggatggtgaccctggagcacctgcgtgaacttgttgagcaagctgaacagcaggatattccagccgcggagttacttgatccattactgatgccaatggacagtccagcttcggactatccggtggtgaatcttccgttaacgtcttctgtttacttcaaaaatggtaacccggttcgtacatctggtgcgccactggaaggactggttcgcgtcacggaaggtgagaacggcaaatttatcggtatgggcgaaattgacgatgaaggccgcgttgcgcctcgtcgcctggtggttgaatacccggcgtaatgttaaccgtcttgcgataacaggtcgctacgagtagaatactgccgcttaacgtcgcgtaaattgtttaacactttgcgtaacgtacactgggatcgctgaattagagatcggcgtcctttcattctatatactttggagttttaaaatgtctctaagtactgaagcaacagctaaaatcgtttctgagtttggtcgtgacgcaaacgacaccggttctaccgaagttcaggtagcactgctgactgcacagatcaaccacctgcagggccactttgcagagcacaaaaaagatcaccacagccgtcgtggtctgctgcgcatggtttctcagcgtcgtaaactgctcgactacctgaaacgtaaagacgtagcacgttacacccagctcatcgagcgcctgggtctgcgtcgctaattcttgcgagtttcagaaaagggggcctgagtggccccttttttcaagctgacggcagcaattcactggaaactaatgtattgttgctatgaatgatcttccgttgcagaggttcgcgcggctaatgagaggctttacccacatagagctgggttagggttgtcattagtcgcgaggatgcgcagaagatcgggtattaacaccagtgccgtaaggtactgtctaagaaagagaaaggatattacattgcttaatccgatcgttcgtaaattccagtacggccaacacaccgtgactctggaaaccggcatgatggctcgtcaggctactgccgctgttatggttagcatggatgacaccgcggtattcgttaccgttgttggccagaaaaaagccaaaccaggtcaggacttcttcccactgaccgttaactatcaggagcgtacctacgctgctggtcgtatcccgggtagcttcttccgtcgtgaaggccgcccaagcgaaggcgaaaccctgatcgcgcgtctgattgaccgcccgattcgcccgctgttcccggaaggcttcgtcaacgaagttcaggttatcgccaccgtggtttctgttaacccgcaagttaacccggatatcgtcgcgatgattggtgcttccgcagcgctgtctctgtctggtattccgttcaatggcccgattggtgctgcccgcgtaggttacatcaatgaccagtacgtactgaacccgactcaggacgagctgaaagagagcaaactggatctggttgttgccggtactgaagccgctgtactgatggttgaatctgaagctcaactgctgagcgaagaccagatgctgggcgcagtagtgttcggtcatgaacaacagcaggttgttattcagaacatcaatgaactggtgaaagaagccggtaaaccgcgttgggactggcagccggagccggtaaacgaagcgctaaacgcgcgcgttgctgcactggctgaagctcgcctgagcgatgcttaccgcatcaccgacaaacaagagcgttatgcgcaggttgatgtcatcaaatctgaaaccatcgcgacgctgcttgctgaagacgaaaccctggacgaaaacgaactgggtgaaattctgcacgcgatcgagaaaaacgttgttcgtagccgcgtactggcaggcgaaccgcgtatcgacggtcgtgaaaaagatatgatccgtggtctggatgtgcgtactggcgtgctgccgcgtactcacggttctgcgctgttcacccgtggtgaaacgcaggcgctggttaccgcaacgctgggtactgctcgtgacgcgcaggttcttgatgaactgatgggcgaacgtaccgataccttcctgttccactacaacttccctccgtactccgtaggcgaaaccggcatggtcggttctccgaagcgtcgtgaaattggtcacggtcgtctggcgaagcgcggcgtgctggcagtcatgccggatatggacaaattcccgtacaccgtacgtgttgtgtctgaaatcactgaatccaacggttcctcttctatggcttccgtgtgcggcgcgtctctggcgctgatggacgcaggtgtgccgatcaaagctgccgttgcgggtatcgcaatgggtctggtgaaagaaggcgacaactacgttgtactgtctgacattttgggcgacgaagatcacctgggcgatatggacttcaaagttgcaggttcccacgacggtatctctgcactgcagatggatatcaaaattgaaggtatcaccaaagagatcatgcaggttgcgctgaaccaggctaaaggtgcgcgtctgcatatcctgggcgtaatggaacaggcgatcaacgcgccgcgtggcgatatctctgagttcgcaccgcgtatccataccatcaagatcaacccggacaagatcaaagatgttatcggtaaaggcggttctgtaatccgtgctctgaccgaagaaactggcaccaccatcgaaatcgaagatgacggtactgtgaagattgcagcgaccgacggcgagaaagcgaaacatgctattcgtcgtatcgaagagatcactgcagaaatcgaagtgggccgcgtctacactggtaaagtgacccgtatcgttgactttggcgcatttgttgccatcggcggcggtaaagaaggtctggtccacatctctcaaatcgctgacaaacgcgttgagaaagtgaccgattacctgcagatgggtcaggaagtaccggtgaaagttctggaagttgatcgccagggccgtatccgtctgagcattaaagaagcgactgagcagtctcaacctgctgcagcaccggaagctccggctgctgaacagggcgagtaaggttgccatttgccctccgctgcggcggggggcttttaaccgggcaggacgccttgttagcaaccgggaacaggacgttcattcaaccgtggtcttcgggagtgggaaatgaagccttttttgcgctggtgtttcgttgcgacagcacttacgcttgcaggatgcagtaatacttcctggcgtaaaagtgaagtcctcgcggtaccattgcaaccgactttacagcaggaagtgattctggcacgtatggaacaaatccttgccagtcgggctttaaccgatgacgaacgcgcacagcttttatatgagcgcggagtgttgtatgatagtctcggtctgagggcattagcgcgtaacgatttttcgcaagcgctggcaatccgaccggatatgcctgaagtattcaattacttaggcatatatttaacgcaggcaggcaattttgatgctgcctatgaagcgtttgattctgtacttgagcttgatccaacttacaactacgcgcacttgaatcgcgggatcgcattatattacggcggtcgtgacaagttagcgcaagatgatctgctggcgttttatcaagacgatcccaatgatcctttccgtagtctgtggctttatctcgccgagcagaagctcgatgagaagcaggctaaagaagtgttgaaacagcacttcgaaaaatcggataaggaacagtggggatggaacattgtcgagttctacctgggcaacattagcgaacaaacgttaatggaaaggctcaaggcggacgcaacggataacacctcgctcgctgagcatctcagtgaaaccaacttctatttaggtaagtactacctaagtctgggggatttggacagcgccacggcactgttcaaactggcggttgccaacaacgttcataactttgttgagcaccgatacgcattgttggaattatcgctcctgggccaggaccaagatgacctggcagaatcggaccagcaatagctgacgtacacatcagcccgtaatcttttttgattgccatcaccttaacgggtgagggcgttgttgttcgttaatacacctactttgagccggttcacacttttcaatgaaaattgctgatcaatttcatgatgagttatgtagactggccgccattaattttgaggcacacgtactacatggctgaattcgaaaccacttttgcagatctgggcctgaaggctcctatccttgaagcccttaacgatctgggttacgaaaaaccatctccaattcaggcagagtgtattccacatctgctgaatggccgcgacgttctgggtatggcccagacggggagcggaaaaactgcagcattctctttacctctgttgcagaatcttgatcctgagctgaaagcaccacagattctggtgctggcaccgacccgcgaactggcggtacaggttgctgaagcaatgacggatttctctaaacacatgcgcggcgtaaatgtggttgctctgtacggcggccagcgttatgacgtgcaattacgcgccctgcgtcaggggccgcagatcgttgtcggtactccgggccgtctgctggaccacctgaaacgtggcactctggacctctctaaactgagcggtctggttctggatgaagctgacgaaatgctgcgcatgggcttcatcgaagacgttgaaaccattatggcgcagatcccggaaggtcatcagaccgctctgttctctgcaaccatgccggaagcgattcgtcgcattacccgccgctttatgaaagagccgcaggaagtgcgcattcagtccagcgtgactacccgtcctgacatcagccagagctactggactgtctggggtatgcgcaaaaacgaagcactggtacgtttcctggaagcggaagattttgatgcggcgattatcttcgttcgtaccaaaaacgcgactctggaagtggctgaagctcttgagcgtaacggctacaacagcgccgcgctgaacggtgacatgaaccaggcgctgcgtgaacagacactggaacgcctgaaagatggtcgtctggacatcctgattgcgaccgacgttgcagcccgtggcctggacgttgagcgtatcagcctggtagttaactacgatatcccgatggattctgagtcttacgttcaccgtatcggtcgtaccggtcgtgcgggtcgtgctggccgcgcgctgctgttcgttgagaaccgcgagcgtcgtctgctgcgcaacattgaacgtactatgaagctgactattccggaagtagaactgccgaacgcagaactgctaggcaaacgccgtctggaaaaattcgccgctaaagtacagcagcagctggaaagcagcgatctggatcaataccgcgcactgctgagcaaaattcagccgactgctgaaggtgaagagctggatctcgaaactctggctgcggcactgctgaaaatggcacagggtgaacgtactctgatcgtaccgccagatgcgccgatgcgtccgaaacgtgaattccgtgaccgtgatgaccgtggtccgcgcgatcgtaacgaccgtggcccgcgtggtgaccgtgaagatcgtccgcgtcgtgaacgtcgtgatgttggcgatatgcagctgtaccgcattgaagtgggccgcgatgatggtgttgaagttcgtcatatcgttggtgcgattgctaacgaaggcgacatcagcagccgttacattggtaacatcaagctgtttgcttctcactccaccatcgaactgccgaaaggtatgccgggtgaagtgctgcaacactttacgcgcactcgcattctcaacaagccgatgaacatgcagttactgggcgatgcacagccgcatactggcggtgagcgtcgtggcggtggtcgtggtttcggtggcgaacgtcgtgaaggcggtcgtaacttcagcggtgaacgccgtgaaggtggccgtggtgatggtcgtcgttttagcggcgaacgtcgtgaaggccgcgctccgcgtcgtgatgattctaccggtcgtcgtcgtttcggtggtgatgcgtaatcatcgctgaacagcgaacacaatctgtaaaataatatatacagccccgatttttaccatcggggctttttttctgtcttttgtactcgcgtactggtacagtgcaatgcataacaacgcagtcgcactatttttcactggagagaagccctcatggcaacactaaccaccacccaaacgtcaccgtcgctgcttggcggcgtggtgattatcggcggcaccattattggcgcagggatgttttctctgccagtggtcatgtccggggcgtggtttttctggtcaatggcggcgctgatctttacctggttctgtatgctgcattccggcttgatgattctggaagctaacctgaattacagaatcggttcgagttttgacaccatcaccaaagatttgctgggcaaaggctggaacgtggtcaacggcatttccattgcctttgtgctctatatcctgacctatgcctatatttctgccagtggttcgattctgcatcacaccttcgcagagatgtcactaaacgtcccggcacgggcggcgggttttggttttgcattgctggtagcgtttgtggtgtggttgagcactaaagccgtcagtcgcatgacagcgattgtgctgggggcgaaagtcattaccttcttcctcacctttggtagcctgctggggcatgtgcagcctgcgacattgttcaacgtcgccgaaagcaatgcgtcttatgcaccgtatctgttgatgaccctgccgttctgtctggcatcgtttggttatcacggtaacgtgccaagcctgatgaagtattacggcaaagatccgaaaaccatcgtgaaatgtctggtgtacggtacgctgatggcgctggcgctgtataccatctggttgctggcgacgatgggtaacatcccgcgtccggagtttatcggtattgcagagaagggcggtaatattgatgtgctggtacaggcgttaagcggcgtactgaacagccgtagtctggatctgctgctggtcgtgttctcaaactttgcggtagcgagttcgttcctcggcgtaacgctgggtttgtttgactatctggcagatctgtttggtttcgacgactcggctgtgggccgcttgaaaacggcattgctgacctttgccccgccagttgtgggggggctgttgttcccgaacggattcctgtacgccattggttatgctggtttagcggctaccatctgggcggcaattgttccggcgctgttagcccgtgcatcgcgtaaacgctttggcagcccgaaattccgcgtctggggtggcaagccgatgattgcgctgattctggtgtttggcgtcggcaacgcactggtgcatattttatcgagctttaatttactgccggtgtatcagtaatcagcggtgccttatccgacatttctgctgcctacacaatgcctgatgcgcttcgcttatcaggtctatgtaggacagcgttgccagctcggataaggcttcccgcgttaagacacactatcccaacaactcttccttaacatccatcgccagctcaaacgaatgcagccgcgcctggtggtcgaaaatctgcccgttgaccataatctcatcggcgtcggtttcgcgcaggatcgactgcaagccatgacgcactttcgctttatcacctaccaacgacatactcagcgcctgctgcacgccatactgctcagacggtgaccagaactgatccatattttgaatcggcggcggcagttgcccggtttcgccacggcgcagcttcacaaaggcttgctgcattgaggtaaacagaaattcagcgtcgcggttgctgtcggcggcgataatattgatgcacaccatcgcgtatggtttttccagccgtgctgacggtttgaagttgctgcgataaagatgcagcgcctggaacagcatatccggcgcgaagtgtgaggcaaacgcaaacggcagaccaagctgcgccgccagttgcgcgctgtaaaggctggagcctaacaaccacacggggattttctcgccatagcctggtaccgggcgcacatgcggattgggatcgcgggcgtcaaaccagtccaccagctccgccacatcgcgggggaaattatcaatatcgccgctcatatgacgacgtagcgccatcattgtccgttggtcactacccggagcacgacccagccccaaatcgattcgccccggatagagtgtattaagcgtgccgaactgttctgcaatgaccaacggtgagtggttaggcaacatcacgccgccagaccccagatgcagcgtggtggtattcgccgccagatagccgatcaataccgacgtggcagcactggcaatgccagtcatattgtggtgttctgccagccagtagcgatgatagccgcgcttttcagccagacgggcgagatcgagagagtgggagaatgcttctcgcgctgaagaaccttcgggaatgggggccagatcgagtagcgaaaacgcaatggttttatcagtcataacagctcactttgttaccgattaatctttaatactgcattaaagagtagttaaagttgttaacaaagtgagctatttacttaggcttgcagctccagtcctgccagccgccgccagtagccgttacagtcgctgttcgccgtcaacggcagtggtgcagcgccattttcattagcgcggaaggcgtcgagcatcgcgaaagtgtcagtaccctgcggtgacaggcggaccacatcaaccaggccctgcatggatgccagctcgttaccgaggttgtaaacgtagccgctcatggtctgaatgccattgagtacaaacacttgttggttttcctgcgacagcacgttgcgcccgttcggatacttaatgcagcaggtttcacactcatctttcgggcggtcttccgaacgcgcggtaaagcagcgggcggagtaggccagcggcagatgaccgtagctcaggacttccacttcaaactggttacgaatgcccagctcatcgcactgattaagcagattcaccagccagtcgcgggaaagctccactggcatacaccagcgcatcatgccctgtttgagcaatattttcagtgtcaccgcgttgtagcagttcagcgcgtgcccggcgacgaacggcagtttgcgttcagcgcacatattcaccacgccgagatcgctggcttcaatcagaaactcaccgttctcaacatagcgtttcagttcgcccagttcagatgatgcctgcaccagcgccagcgtggagagcacaatctgcttaccactcccggcgagcgattttgccatctccagccagtcgccaactttggttgcccgacgcttgctgcataccgcttcaccaagataaatcacgtcggcgctgctggtggcggcctgctgataaaattcttccagcgtctcttttggccagtaccacagcactggccctaaggaatatttcattgcttttctcactgccatttacggtgatatgcgccaagagtggtttgcgtgccttcggacatcgacccgagcgtctccatccacgcgctttgcggtacaaagttttgcggatcggccttacaacggtcgatagcctgacgccagactttcgccacctggctgacatacgccgggctacgctggcggccttcaattttcaccgaagcaatattcgccgccattaactccggcagcagttccagggtattgagactggttggttcttccagcgcgtgatagcgctcgccgtccaccagataacgccctttacatagcgtcggataacctgcgttttcgccgtcctgataacggtcgatcagcacttcgttcaggcgggattccagcccctgcggcgtttgttgccagcgcacgaaacgggccggagaacacgcgcctatggtgttgggcgactcacccgtcagatacgacgacagatagcaacgaccttccgacataatgcacaggctgccgaaagcaaagacttccagtggtacaggtgtgacccgtgccagttgtttcacctgatgaatcgacaacacgcgcggcagcaccacgcgagcaacgtcaaaatggcgatgataaaagttaatcgcctcttcattggtcgccgaagcctgcaccgatacgtggcgctcaatatgcggataacgctcggcggcgtactccagcatggcgaggtcggcgaggatcagcgcgtcggcacccagctgcgccgccatatccacggcgcgctgccaacgggcgtaaccgtccggatgcgcaaaagtgttaatcgcgatgtgaagtttgcggcgatgttgatggacaaaactcaccgcttcctgcaattttttctcggtaaagttaaggccggcgaagtgacgggcattggtatcatcttttagcccgatataaacagcatctgcgccgttttcgatggccgccttaagcgccgggagatttccggcagggcagagcagctccataatttttcctgaaggttgcgctatcaaaacgcaaaaatgttaacgaactgggattttagttaaccttgctgcgacaatttttgatttaaggcagttaaagttgtattggtggtagcagcaatttcatatggaattgttgatttataccgctatgttatttttctgatatggcaaaataggatgattgttgaaacagggagtaaaactcgtgttggataaactgcgttcccgtattgtgcatttggggccatctctgttgagtgtaccggtaaaactgacgccatttgcgctaaaacgccaggttcttgagcaggtcttaagctggcaattccgccaggcgctggatgatggcgagctggagtttcttgaaggccgctggttaagtattcatgtgcgtgatattgacctgcaatggtttacctcggtggtgaatggcaaactggtcgttagccagaacgcgcaagctgatgtgagttttagtgccgacgccagcgatctgctgatgattgcggcgcgtaaacaagatccggatacgctcttcttccagcgtcggctggtgattgaaggcgatacggagctggggctgtatgtgaaaaacctgatggacgccattgaactggagcaaatgccgaaagccttacgcatgatgctgctgcaactggcggattttgttgaggcgggaatgaaaaccgcgcctgaaaccaaacagacatcggtaggtgaaccatgctaattcgagtagaaattcccattgatgcgccgggtattgatgccctgctgcgtcgctcattcgaaagtgatgcggaagcgaagctggttcacgatctgcgtgaagatggctttctgacgctggggctggtggcgacagatgacgaaggtcaggtcattggctatgtggcatttagtccggttgatgtgcagggcgaagacctgcaatgggtcggcatggcaccgttggcggttgatgaaaaataccgtggacaggggctggcacgccaactggtctatgaaggactcgattcgcttaatgagttcggctatgccgcagtggtgacgctgggcgatccggcgctgtacagtcgtttcggctttgaactggcggcgcatcacgatctgcgttgccgctggccgggcactgaaagcgccttccaggtacatcgtttagcggatgacgcgctgaatggcgttaccggcctggttgagtatcacgagcatttcaatcgcttttaatctccggggtttgcagactgcttaacagctctgcaaaccctgcgccttccgctaccagacgctctttttgccgtttggtcagttgcttaacgcgatattccgcccgtaacgccagcgaacgatcgcccactggcgcggaaaacaccagcgttagttctcctttcccgcgcagtgctttcgcccctttgctgctttggtgctgctgatagcggcgttcgacatccgtggtgatcccggtataaagcttattgtcggcggtacggatcaagtaaagaaaccagggtgtcatcgtctgcgtcgcatgttaaggtcaggcccacagtataaaagagaacagcaatggaaacactcatcgccatcagccgttggctggcaaaacaacatgttgtcacttggtgtgtgcagcaggaaggggaactctggtgcgctaatgccttttatctttttgatgcgcagaaagtcgccttctacattttgacggaagaaaaaacgcgccacgcgcagatgagtgggccgcaggctgcggttgccggaacggtaaacggtcagccgaaaacggtagcgttaattcgcggtgtgcagtttaaaggtgagatccgcaggctggaaggtgaggaaagcgacctcgcgcgcaaggcgtacaatcgtcgctttccggttgccagaatgctgtcggccccggtgtgggaaatccggctcgatgaaatcaaattcaccgacaacacgctgggctttggtaaaaaaatgatttggctacgcgactcaggcaccgagcaggcgtaacgcctcgcggttaaacgctggcagatcgtccggtgtccggctggtaaccagctgatctttatcaaccacgacttcctgatcgtaaaattccgcgcccgcatttttaacatcaataatgatcggtttaactgcggtcagtttgcgcccccgaatcacatcggcgctgatcagcaactgcgggccgtgacagatggcaaacaccggtttgccactattcacaaaatcacgggtaaaggtgacaaaacggttgtccccacgcagataatccggtgaatggccgcccggtagcagcagggcatcaaactccgcaggcgtcacttcatcgatggatttatcgatggtcacgctggcttctccttttttgcctttcaccgttttacccgcttgtttttcaatggtaatcacttcgtgtccggctttacggaactcgtctgcgggtgaagtaaattctgaatcctcaaattcatcagtgattaaaacggcaattttcttactcatgcttcctccgcgttgttgcattggatgaggcgaatttcccacaatcggggataattacctcatggtctattaagcctggtgcatgagccgtggagcgcaaggcagacaattctgtaaaggagcgaagatgagtcaggtactgattacaggcgcaacggggctggtgggcggtcacctgctgcggatgttgattaacgaaccgaaagttaacgccattgctgcgccgacgcgacgtccgttgggcgatatgcccggggtgtttaatccccatgatccgcaactgagtgacgcgttggcgcaggtcaccgatcccatcgacattgtgttttgttgtctcggcaccacgcggcgagaagcggggagcaaagaggcgtttattcatgccgattacacgctggtagtggataccgcattaaccgggcggcgactgggcgcgcagcatatgttggtagtcagtgcgatgggtgccaatgcccactcgccgtttttctataaccgcgtcaaaggggagatggaagaagcattaatcgcccagaactggccgaaattgaccattgctcgcccgtcgatgttactgggcgatcgtagcaaacagcggatgaacgaaacgctttttgcgccgctgttccgtttgttaccaggtaactggaaatccattgatgcgagagacgtggcgcgggtcatgctggcagagtcgatgcggcctgagcatgaaggcgtgacgattttaagctcttcagaattacgcaaaagagctgaataattattcccaagaattgatagtgagcgtaatattcacgcgctcaattatcataacttattcctggggaatgctatgactggtcagtcttcatctcaggcggcaacgcccattcagtggtggaaacccgcgcttttctttctcgttgtcattgccggtctctggtatgtgaaatgggaaccttactacggcaaagcgtttactgctgccgaaacccacagtatcggtaaatctatccttgcgcaggcggatgctaacccatggcaggcggcgttggattacgcgatgatctatttcctcgcggtatggaaagcggcggtgctgggggtgatcctcggttcgttgattcaggtgctgatcccgcgtgactggttgttgcgtacgcttgggcaatcgcgctttcgcggcacgctgctgggaacgctgttttcgttgccgggcatgatgtgtacctgctgtgcggctccggtcgcggcgggaatgcgtcgccaacaggtgtcgatgggcggtgcgctggcattctggatgggcaatccggtgttaaacccggcgacgctggtgtttatgggctttgtcctcggctggggttttgcggcgattcgtctggtggccgggctggtgatggtgttgctgattgcgacgctggtgcaaaaatgggtgcgtgaaacaccgcaaacgcaggcaccggtcgaaattgacataccggaagcacagggcgggttttttagccgctggggcagggcgctatggacgcttttctggagtacgatcccggtttacatccttgcagtactggtgttgggtgccgctcgcgtctggttattcccccatgccgatggtgctgtcgataacagcctgatgtgggtggtggcgatggcggtagcaggatgcttgtttgtcattcccacggcagcagaaattccgattgtacaaacgatgatgctggcaggtatgggaaccgctccggcgctggcattgttgatgacgctcccggcagtgagtttgccgtcactgattatgctgcgcaaagcgttcccggcgaaagccttatggctgacaggggcgatggtggcagtgtctggtgtgattgtcggcgggctggcgctgttgttctgatttgagggaaaacatgtcggatgcggcgtaaacgccttatctgacctacggtttgtatcgttgtaggcctgataagacgcggcaagcgtcgcatcaggcattacaaggggctgctatttaataaacgtaaacgccgtagttacccgcttcacgccgctcacccggctggcaatatctgccgccgctttcgcttcacgttcagtcaccagccccatcaggaacacttcaccgttttcggtggtcactttcacgttggacgatttcaccaggtcgctggttaagagctgcgaacgcactttggtggtgatccacgtatcgttagatgcttcgcccagaccaatcggctggccctgacgaatctcgttatacacttcgttggcaccgtctacgcccatagcaatctgtttggcgcgagccgaaagttcagcatttggtgactgcccaaccagcagcactttgccctgataggccgttacattaatgcgcgcttctttcttaatctgttcgtctttcgacaatgcgctgttcacgcgcacttccagggtaccatcgtccacctgggtgccgacactgcgtgggtcagttgcggctttggtacccacagcagcggtacccactacggcagcggcaacacaaccttgcaacagcagcgcggaaataaggactgcgattggcgataatgccttcatgtattctccttaatcatcctggtgagggaaaagcgtgttatcgatcagatcgcacaggcaatttaccgtcagcatatgcatttcctgaatgcgagcactacgatgcgaaggaatgcggatctccacatcctgtggccctaacaaacctgcaagttcgccgccgtcatagccggtcaatgccacaatggtcatatcacgcgtaacggcggcttcaactgctttaacaatatcgcggctgttgccacgggtggaaatggctaacaatacatctcccgcatgacccagcgcccgcacctgttttgcatacacttcatcatgtaagcgatcgttggcaatcgccgttaagacaacattatcagtatttagtgcaatggcaggtaagctgggccgctccgtttcgaaacggttgatcatgctggcagcaaaatgctgtgcattggcagcggaagttccattaccacaacagaggattttgttgccattgagcagagactgaaccagcgtcatggctgcacgggagatggcatccggaagcgcctctgccgccgcaatttgagtttgaatgctttcagtgaagcaagctttaattctttcttgcacgctaatccttaaaccttaattatgagtggtcattaaaggcatccttaatccactcaacctcattcccggtgaaggctaccacatcgaaccggcaatccacagtatcaaaactcccattatgacgcgcgagccacaagcgggcagtctgtaataatttgtgttgtttgctgcgggtcacactggctgccgcgccgccataaagcgcagagcggcgatagcgtacctcgacaaaaatggtggtccggccttcacgcattatcagatcgatctcgccgccacgctcgttcacgttagcggcgataaaccgcagtcctttgccttccagccagcgacgcgcttgtgcttcccacgcatcgccggtctgtttggtggttaactgacggggactacctgaccttgttggtactgtagccatgataagttcctgttaatcacgcaatccgggttagccgtcaggcttccggtattaccgttgatttcaaaaccctgaacctggcgcatttgtgagaaatgatttgccagcgaccaggcatcgacgcccatcgcatacatgcgagccagtgaataatcgttattcaccgcgctgagtgcctgctgcattaacggtagattaccgcctgccagcatcgggatttcgctgtactgcaagccttccatctccagtcggaaatccgggccagcggtcccttgcgcactgcgggagctggcgtacagcgttgcaccgctctggctaccgttacgcatggcgatcatcggtttgataaaagcgatttcacccggcgttgccacaatgtacaccgcatcgacacgaccgccattattggtgaactggtcatcggttggcgtggtttgcagcgttggattgttggtcgtcatgccggagtcggttgtcgctctgagagtaatcgggctacccgttaaagcaataccagaaccgccgttaacacccgcgcgtaattcgctggtggaaccaaatttttgttgcagaacggtgccgccgcccagtttctgccactcttgcgcaaacgcattggctacgcgatcgcccaatgaactgcgtgggatcagcaccagcggcgcttgtttaccctggtcacgaatatgacgcgctgcatcgcgcgcttcgtcttccggtgaaagcgcgaagtaacaaatattgacgcgattttcgatattctccggctggttcagtgccagtacgttcagcggagtgttgctcttcagcaactcttcaacgttatttttcagcaacggaccgaccacaatactcgcgccatcctgctgaacctggcttaagatctggctaagtggttgtgatgaggtatcgtagattttcagctctgcggatggatttgcgggtgcgcttaccgctgcggtgcttgtcgccggggcgcttacaggcaccggctgggctgcaggctgttcaccggtcagatcgctaaccgaggcttgtgccgggctggcaacgccatccacggtttgcggctgaggttgttcagctacgtctgcggcaggtgcggcagctacctgagctgccactggctgagtgccgatatttttcgccgcttcaaagccttgctgaatagtgcgaccaaataccgctgcctggccattcagtggcaacagcagggcgattttgttggtcgaggctggtttaaacgcttttacgttaaccaactgcgttggcagcattttcgcgcccggattgttcggataacgtttctgccagtcggcgatcccggctttcatcatgtcgggatcgttacggttatcaaaccagacgcgctgcagatccagccagccttgcagaatattttcgtcggcgttgatcaccagcgtattcgcctgttcctgagtcatggaggagagcgcctgccaggtggcattaatattctgctgtttttctttcgcgccaagcagcggttcctgagcaattaacgcgcgcagtaaatcaatggaaggacgcccctggctggcatcgatttttgcctgccagtaacgcgcttgctggttttgttctaaatcggcaggtgtgattttcgccagcaagttttgcgcgccagcaaaatctttctgcgccagtttaatctctaccgccagcagtgttttctcgcgacgctgagcatcgttcagttcttgcggtagttggttaaacaactcaaccgcctgcccggttttaccttctttcaccagtgcacgaatggcgagtaattgccagttgatcctggtatcatcagagctttgctgcatctgctgaagataaaaggcagaatcagcctgcgccgtgccctgcatataagcagtggactgatcgggagtatgggtgccacaaccggcgaaaatcagggctgccagaacaacaggcagacaacgcgcggctttcaaacgagaaaatgttgagggtaccataatgtatccagtgatattttttttacgcaatgctcaatattaaatcggcaatacggacgacacaatgaaacaacaccaatcggcggataattctcagggccagctttacattgtaccgacgccaatcggcaatctggcggatatcacccagcgtgcgttagaggtattacaggccgttgatctgattgccgccgaggatactcgtcacaccggtttattgctgcaacattttgggattaatgcccggttgtttgcgctgcacgaccataacgaacaacaaaaagctgaaacgctgctggcgaagctgcaagaggggcaaaacattgcgctggtttccgatgccggaacgccgctaattaacgatcctggctaccatctggtgcgtacctgccgtgaagcggggatccgcgtggtgccgctacccgggccgtgtgctgctatcactgcgttaagcgcagcgggtttaccctctgaccgtttctgttacgaaggctttttacctgccaaatcaaaaggccgccgtgatgcgctaaaagccattgaagcggagccgcgcacgctgattttttatgaatctacccaccgtctgttagatagcctggaagatatcgttgcggtattaggcgaatcccgctacgtggttctggcgcgtgagctgaccaaaacctgggaaaccattcacggcgcgcccgttggcgagctgctggcgtgggtaaaggaagatgaaaaccgtcgcaaaggcgaaatggtgctgattgtcgaaggtcataaagcacaggaagaagacttacccgccgatgccctgcgcacgctggcgctgctacaggcagaactgccgctgaaaaaagcggcggcgctggccgcagaaattcacggcgtgaagaaaaatgcgctgtataagtatgcgctggagcagcaggggtaacagtgccgaagcgttgcgttaatcaaaacgcaacgtcttcttttaccgcacgatgacggtaatggtggctgtgccctgaaattttcctgtttccagctcaccaccgaccagattaactggccaggcgcgcatattgacggtgccatgcccggaaggatcaacgggaaggataccgttctgaaaaggaatatttgcaactccgccgccgagattttcaatacgaataccgacatcgggcacattgtctgaacttcttcgcctggcgaccaggttgtactggtctactaccccagttgtaccgtcgatgcgcatttgcaacgagtttttaatctttgaagtatcaccacagtcataagtgatatcaaagtctactggagtaaaaccgtctggcatggcattgcgggtggtaaacttctgaccattgatgaatccaaaattaaccttaataacatcgccctgattaattttgcacgactgtggggcggtgagatttccctgaatcgataacttgactaaatcatggaagtcacctgtagacgggcttcccattccatcgacccacgcgcctttaatgacggcaatatccgttttcggaatggtcatcgagccgagaaatggcttggtgacatacagggtaaaggtggtgttcgcaccaatattaacgggtccataacgagacgtatcaccctggcaaacacccgtttgggttgcagcagaatataccgtgttgttttttatctgtgtgaatcgggtgttaacagagacaacctggtcggttgtgagtcctggaatgtcgtttgcctgtaatgtggttttaatatccaggctgtcattgagtttgtaatatcctgtctgatgtccagtggtggtaagtacggggctgaccatatagacaagtttaactgccttacccgcagagcaggaacaggcgtattgccagttagtgctacttagcgttgcagaggtaaactcccgtcctgtcacgttatctgtctggttcaccgtaacatcatcaaccacactgctgtaatttgtcgcaccgctagtgctgtcggctccacaccctcctgaggaggcataagcgcaggatgtggatatcaacaaaagacctgttataagaggcgctcttttcatttttttatccttaatggcactgcgctgtgccttgtaatacagaggttgtaggttctgaatccggtgtactgaaagcaaactgacattgttgatctgcctgatttccccagcgtacagtccagctttgtgatttactcgatatcccagagagatatagtatgccgccctcatcgacgatactttgttgccccgtatcatcgttgctggcaagagcgccaaagggcaacggtttaccgttgcgatcgctgactgtaacaagtacgcgataaccgatattggcgttgaaacgcgccgctaccattgcacctctgttgggcaccacaaactgtgttgtttgttcaagatcgacgttatcgggcagctgcgtagtatctaccgagagacggttttcctgataagttgtgagataaggaaccactgcatagccaaaaggatcggtagcaatccccggatagttttgtatcctcacgccagatgctccgttagcatcgataagcgcaaaagcgttgcccagatattgcgagagcgtcacgccatgaggatggataaccacgccgccggtaacgccgtaattgtattggctgctgtcattaccgtagctgtatccggcactgaaggtgccataaggtgaacggtaactggcgttcaggctactgttatggttgttatcgtcatccagactttgttccaggctatagctcaggcgaccatcatccagcagtgagccatcaagacgcatttcatgttgggttgggcgatctttctggctggtcatctgataggaaacccggctacgcggtaaccagcgttctaacggaatactgagattcaaagagagtgcgcggtcattattttgatcagtgtagcggctgtattgataattcaggctgtaaccaactccccattgctggccggaaaccccaacagagatattcctgtttttatcgttattgccccaatagtcttgctgcgaaccggaggcatacagacttaccccatcaaatattgtctggctgatgttgaattgaatttcacttttttggcgactgttatagtcccaattgcgggtattggcttcattaaaactaaaatagccatcgttggtatagcgatagtagctgacagcgatattggtgttggtttccgggatatctttgatgtactgcgtacgccattgatagccatgaaaagagtgctggttatcgaattgggtgtcagctctgttgatatccatcgacaacgcgcccagtgcgccaagtgtgccgccgataccgatccccagcgcataataatcttcagaaccgagcaggccgccatacagcgtaaaagtattattcaaaccatatattgccgtggcttcagcaaattcgggttccttgctatcactgtttgcatcagcgcgatagcgtccagcggtcgcgctatactttagatgcccaggtcgctgcatcatgggtaatgaagaataaggctggataaagcgacgttgtgtaccgtcactttcttcaatcgtgacttctaaatcgccgctgttggaagaggggtagagatcgttaatttcaaaggcacccgctgacacgttgctttgatagatcacataaccattttgcctgatagtcacgattgcactactgtttgcgataccgcgtaccgttggggcaaatccgcgctggctgtttggcaacatattatcgtcggaagcgagttgcacgccagtaaaggtgtagctggaaaaaatactgccgctggtggcgctttctcccagaagcaactgagacttcaacgccttgatatcacgttgtaaataactactgatggtattccagcttgatgtctgatcgttgcgtgtccatgtggaatagttgcgtaatcgccaggggccaaaattagcaccattttgcatattcaggtactgtcgttggctacgattgccctggcggtaacggttatcagaacctgtaaacgagtagttggtaaacagcgttggtataccatcgtcccaacgagaaggggagacgtaacctcttgcatcacggtacagtgcaatttggggaatgctcaaattaagttgctgatgattgaaatcaaattcagcagctgtaccgggaatgatttgttcaagcgagttgatcacgctatcgtcatctttttcagccagcgccgggatttcatccaccttaatacccagctcacgtagttgttctaccgtaaactgtggctgcagaagttgctctgcattggcggtaaatgtaatttttttctgtgaaaccttctttttattcagccagatatcaacctgataagttcctggtagttgtgcatatttttttgaaaaacgcgacagatcggttgtttgcataccactttttgtggtttccagcataatggggtcgaaataatactcttcggcgttagcggtagtgcaaagcatgccgctgccagtgagcaccatcggcaaacaacgtttgatgatgagcgccaactgtttcggtgtgcgtttatgtccctggtggtgtcgttgtggcattccctgatgacctgtgtttttatattttttattgcagtggacgagtttctgtcccggaactgccgccataatcattgatcgcagcccatttcacgttctttccgccagatgcaggaagtggtaactgtttatgttctccgggcgcgatatattcaattttgcttgtgagatcggttttatcgactgccagtccggcaaatacgacgtaatattcagttgggttatatatattgagtgaatggtcactacgtttaaattccagtgatttccacgcatcgtttacccgtcccttcaggtgtgcggggcgataaaacattttgatccgtgttttaaataccagcgtcaactcgttagcattaacatcatctgattttttctttgctggaatggcacgaacattaatgtagaacagcgactctttattttcaggcaggttatcagctgttttaataattcgcagtgatgagtcatcgccagcctcaagacgaaatagcggtggggttataataaatggggcacggcttttaccatctatattatctacccatgattgcagtaaataaggcgtttctgcgcctttgtttgcgacaggtaacgcagcctctttgcggctggcatcatagatcactcgcgttcgctgtaaaacgattcctcctgcaagcgcctggccaatacagaagctacacaacaaggttaatatcaccgcgaatgttcgttttgacatagttatttttcaacctgatacaacgagaaagaggaaggaaaagggcgttatctgacaggtcagataacgccctaacgtattaacggtaatccagcgttacgttaacgatagcgtctgcttcccctggggtgatttctgatggaactacggttgatacgtagtaagcgatgaggtcaacattgacaataccattggattccgccgggatctgataaaccgtgttatcattgcccatagcattcagtggcataatgtttccgctttccgcatcgtcaatacggatacccacacctgttgccgctatgccagcaaaagagcctacttttgccagattagggaagttagggacggtgccattatctcgcgtttccagccatagacggaaagacgcttcaacgttgccgttatcgtgctcccacccagtcattgggcagttaactaaaggaatagtgaatggaatttttgggctacgctcgccaatattacgaaactgttcggcattatagtgaccaagagcaacttcaattttcttatcagagtcattgatttcacaagcggattttaaaatctcgccatcaaaaactatttcaccatcggttgcagcggcattacctgcgaaaagcgcaagtaagcccgcaatagctgtttttgtaactttattcatatataaccttatccttgtaacaagtacataatcatatttaatgtgaatatatgttcaatatctttaaagattatacaggcagaaatatttcattgaacattaaatagactgaactttaagattatatttatatgcaaatatttgatattttcattatattgatatcaattttctatgtattcaaaagagtataaatgcctgactttgctgcgccagggggcgagtcagaatacgaggtgatttattaatagaacaagttatatgtatatctaaaattaaattgttgaacataactccttttgctatcggcgttatgttcaacccagtcaaatgttatttaatataatgcgtgactgttacataagttaatttaaacattttgagcaaatttttcatctggttaggtgttaattaaacaaataaagttactgtgcagccataaaaatgaagccgggatagcggtagagactttagccgtgagaaaacgatctgtcgcatcctgctttccttcgccagtcaccagtaacaaaacttcgcgggcattgagaatatccttcaggcctaaggtgatcccacgagtcacggggcgacccgcggtttttaacatctcatgttgctgtgttctggcatcaagttgactgatatggcaggccggttgcaggctttctcccggttcgttcagcccaagatgaccgtttttccccaatccgagaacgcataaatccagaccgcctttgcgcgcaatcaggttcgttacccgttcgcactctgtctcatttatctcttcggagcgaaagctgatgagctggtcttcacgtagccccagcggctgcacgatatgctgttgcaggaaagtttcgcaggtgcctggcatcgttaatggcagatccacccattcgtcgagcttcacgaaggtgagctggctgacatcaacctgctgctggtggattttttctaccagataatgatacgtcagtaatggcgtggctccggtcgccaggcaaatcacggcattcggtttgctacggatcacggccaataaatattcgctggcacgttcacttaacgccgtatagttttcaacttgctgaagggtttgcacaggatgaaattccttaagtaaagaggcaccaccagacgcagtgcctcgttccatttacaaaatgccgaatgcggaacaaacaatagagagcacaaaagtcacgccgattaacagcaccggatgcgcttttttcacccgcaggaagtaatacatcagcagggtgtaggccatcggtaaaatgttcgggaagactttatcgaagaaatcctgctgcagcgcaacgctgtgggtattgtcgatggcaaacgatgtcaccacgttaatatgcacatacgaagcgatcagcccgccgattaccgtgatcccgaggatggttgccgaacgggcaatcatctgcgagttctctcgcactttatcgatcgccttcacgccgactgaataaccgacgtgggtccagccgacgcgcaggaaaaagataagcaggtaaacggcgaaaaatagaatcggccccagcaggtttccctggctggcaaatgatgagcaaattcccgccataatcggcaacaaagtaaaccagaaaatcgcatcgccaatcccggcgattgggccaaacagtgccactttgaggcctttaatggtgtcgcggttttctcctttttcttccatcgaaattaataaccccatcaggaatccgaccagattcgggtgggtattaataaattcgaggttatctttcatcgccgcgcttaagcccggtttgtcgtccttataaatctttttcaggatcggcaacatcgcccaggtaaaaccgcccgcctgcatcctttcgtagttaaagctcgcttgcagcagcgacgaacgaaagcccagacgggtgatatcttttttactgatttcagatcccattgctgtagtcctcttcttcatttttactggcaacgggctgcggttgcgcttgctgccgggatttcgcattgaaaaactcatacaccgcaaagcctgcgcccagtacggcaaccggcaacaggttgctgacctggatgtagcaaacaaacaggaaaccggcgatcaggtaagggatatattgcgctttgaacattacgcgcagcagcaagccaaaaccaacggcaggcagaataccgccagccacttcaaagccgtgggtcagccaggcgggcatcgctttcaccagcgcctgcatcgccccctgtgccaggtaagtacagaggaaagcaatcaccgcatacgctgaagcgacgatgagcatcgttgtccagttaagccgggaaaacgctgccgtatccgcctctttcgcgcatttatcggctttggtcataaataatgagaaagcggaatagaagaacagaatgacgtactgcattaacaaactaaacggcaggccaagaccaattgctgttttggcatcaacgcccgtagaccatgcaatgacggtggtcatcagacccgccataatcgggttgggcggctgaacaccacctgcaggggttaatccggcgaaagccaactctgtcagaccaccggtaattaagccagtctgaatatcaccgagaatagcgccagttagggtacaaacgattatcgggcggaataaaaataaggcttccagccaaaaatcaatccccagaacaaaaactaacgccgccagggataatccctgaagtagggttatttcatgcatttttattacctcaaaccaatattaaggcgattttagatttagtcagggatttgttctttttgatcgccagggacgtcctgaatgaaaacattcacgccacgttgtttaataaaacgtaagtccgtgagatcctggtcatcgacataaactttactgctgatttgctttttcccttccgagaaatgcatattgccgacgttgacatctttcaggtcaataccaccttctaccaatttacgtaccgtttgtggcgtacggcaaatcaggaagatcttctgatgtggtgcagctttgccgatgacgttaatggttttttcgatagtaaagaaacgaatgccaaagccgtaggtttccgcggtaatacccattaatttctgttgaatatcatcgttagcgacaacatcatccacgactaccagcagatttgcaccgatggtggatgtccaggtcacgccaacctgaccgtgaaccagacggttatcaatacgggttaagagaatatttggactggtcattgtgtaatcctcaccataaagttgaataatataatttttttaaatatattattgttgcgatattgtagtgatgtatttattaaggtttagttatctccttttccattaaggcactccccgatattaatcgggaagtacattgggataaatcataaaaaactaatgattatgctgaaattcgattcgctgaaccacagacattaattttatttctgacaacttctttcatcgcatccattccgacgcgcatataataacgaggatcattaccctgcggattttccgcaaaccaggctttaaccgcgccagcgaaggctatttttaattctgtggcaacgttcacttttgtgacgccaagttcaatagtgcgacggacaaattcatccggaacatcgctggcaccatgcagcaccagaggaacatccaccacttcacgaatttccgccagccgctggaaatcaatcttcggcgttttgctgtataagccgtgcgccgtaccaatcgctaccgccaggctgtcgacgccagtcagttcgacaaagcgtttagcttcttgtggatcggtcaggaatgcactttcggcgtcaacgctcatgtcatcttcaacaccgcccaggcggcccagttctgcttccacgctgcaatcttgtgagtggcagaagtcaacaaccgatttcaccagcttcacgttctcggcaaacgggaagtggctgccgtcgatcatcgcactgcgcacacctgcgtggactttacggcgaatatcatccagcgattcgtggtggtcgagatgcagcgccagtggcatgttgtaggttgtggaataggcgctacacagggcgtagatctcttccagcgcgatgtgtttaaaggtccccggcgttccggcgaggatcaccggcgatcgcatttcactgcacacttcgaggatcgcttggatcgtctcggcgttatgaatgttaaaagcaggcaccgcgtagccattggcctgggcgtcctgtaacagatatttagtggagataatgctcataatgcgatcctcttatgcctgccacggatgaatgattacgccttgcaccacgcggttaacggtgccactggctgatggggtatccggcgtattgcccatgtgcagcgactgcatcagtgcaaacgtctgggcgtacatcaggaagcaaaatgcctgctcaacgtcgataaagtgacgtgacggtggcaggatgatatgtggaccggcagcgacgatgtcgctgctttccgcggcgatggcgattacacgcattgcctggttgtcacggcgaagttcagccagcagatcaagatcatactgacgggtgtaagggtggctggagacaaataccaccaccagcgtttcgtcatcgaccagcgattttggtccatgacggaatccggttggagaatcataaaaggccgccagtttacccgccgtcagttccagcactttcagcgccgactcgcgtgctgcgccctgtaagccaccgctaccgagataaacgatccgtttccacggtgcgtaaccaaacacaccttcgctgaaatcgcccagtgaggtcaggatcgcctggcaacgatccgccacgtcgcggaaggtttggctgttgatcgtctcaggtgcgaaaaccgcgaggcagctggccatcatggtggtaatgctgctggtcatcgcaaagccgcgatcgtgcgtttctgcgggcatcagcagggcaaacgcgttatcgctgttgatcgcgttttggtaaagagcgcccgcttcgttgcaggtgatcggcaggtgatagcattccggtacaaattgatttgccagttccacggctgcgacgctttccgggctgttgccggatcgaccgaaggagatcaacagcagcggatgagctgggttcaggtagtccatcggattggtgaccagatcggtggtcggtacggcgctgaagtttttaccggtatggctggcgagccacggcgcgatgatgtcaccgataaatgccgacgttccggctccggtcaggatgatccgcagattctctttgcgcagtaacggttcaaggaagttattgagcgcggaacgtagcgcgtcgatgttggtgagtgaacggatccatgcgcgaggctgatggcggatctcttcttcagtccatgtaccggttgcggcggcagcaggggtgtaattttctggcataactcaatccttagtctgatgaacttgacgtcgggcgttgtcgctttcacttgcctttcgtttcatttcacttggtgatgtctttcgttgattaaaatctatagaaaagaaactgaaagttcaatggagaaaaaagaaataaaacgaaatttgtgatcgttgaaagaaaagataaaggaagcaaaagggattgctggatgcggcgcaaacgctttatccggccttgcggtcaccaactgtaggtcggataagacgcgttagcgtcgcatccgacaccgctgcacagatcaaaacgaaagaaaaagaaaggccttacgggggaagtgaaggcccaataaaggagcaaactatcaaaacgaagctaattgaccctgaatccagatttgttgcacatgtagcccgctatccagcgcaacgacgctggcgcgtttgcccggtttaagcgatcccagaacaccatcaacacccagcattcgcgccggatgcagcgacgccatatggatggcttccgcaggcgttacgcccgtcaactcgaccatattgcgcactgccgcatcaacagacagcgtactgcccgccagcccaccagacgcggtacggacaacgccaccgtgcatctgcacttcttcaccacataacgtatagcgaccatccggcatcccagctgcctgcatcgcgtcggtgatcagtacgattctctctttcgcacagcaacaacacagcgacattgccgccggatgcacatgatgaccatcggctatcagttccagccaggcgcgcttgtccgttaatcccgcgccaaccattcccggttcgcggtgatgtaaacctgtcatcccgttatagcaatgcaccaggccgtcggcaccagcatcaaatgcggcgcgggtttgttgccaggtcgccgcgctatgccccagcatcacccttacgttttgctgtttaagatggcggatggcctgcaatgccccttctttttccggtgccagcgctaccacacgtaaggtgtgctgagaaacggcaatcaactgatccagctcggcaatttcaagctcgcgaaacaactccggcggatgcgcgcctttattctgcggcgtgaagtacggtccttcgagataactccccagcacttgcgcaccaggtccgccgcgttggcaacgttgagcaatacgtttcagcgccgcatgaatggtattaagcggcgtggttacggtggtcggtaaccaactgccgacaccttcgcgtgccttgtgcattgccagcttgtcgagtacatccggcgcgtcatccattacatcaacgcccgcaccaccgtgtacatgggtgtcgatgtaagcagggcagagcagttccgcatcgcgttcagtcacgcccgctggaatcggttcgattgctgcgatgacaccgtcagcaatacgcaactgatggtcatcgagccatccctcttcagtcagcagccttctggcgcgcagaacgtgtgtcatattccttcctcgaccggacattcttcatggcagcggcctaactcgtccaccagactggtcagccctcggtgtccacactccagcgcctgtacacggaattcttcaccgcttaacccttcgcgctccagcaccatctccagtagcagttgcaaattggtgccggtgatcacttcacagcccggtttttgcatcgccagcgttgaagctacgcgaaacggcgtgccgcccagcaaatccgtcagaaaaacaatgccgtcttcacaatccagttgggcgatggcctcttcaagctgcgatgtaagcagcgcggtgcttgaggtttccggaaaatcgatggcgataaactgcgattgctcaccgagaatttgcttcattgctttttccatgccgctggcaaacccgccatgccctgtcaaaataatacttaacatctaatacctcattgtatttaaaggaaatggcagaatttaccgacgatgccgagaaccacggtaactgcaatcagacgcagcggactccagccgcggcgtaccaaccaaaacatggtcagggtgtagaccaacggtaagaaggccggcatcagtttgtcgataacatcagcctgtaacttaaccactgcgtcgcccgccgtgatttccagcgtggtgcttaaacgaacataggttgccaccagcgcaccgattaccgtcatcccaacgatagacgcagcatggccgacttttttggtattcgctttaatcagtggaatcgccgccacgcccatgcggtaagcataatgcgtcagaccaaaacgcagccccaggtgtaccacgttgaacagcacaataaagacgactgcgccaagaatggagccttgcaatgccagactggctccaatcccgccacaaatcggcagtagcgttagccagaacattgcatcgccaatcccgccaagcggcgcaccgacggcaattttggtgctctgaatactgttaacgtcctgcttagaacgctccatcgcaaggataatgccgataacaaacgtcaccagaaacggatgggtattgaagaaacccatatgccccttcatggcgcgcgccaggtcgcgtttattagtgtggatctttttcagagcaggcagcagaccgtacaaccagccagaagcctgcatacgttcgtagttaaaagacgcttgtaacagcatggaacgccaggcgacgcggttgatatcttttttcgtcagctccgcgccaatgctctgatcttcatacacgttttcattgacgccagtcagcaatgtttcttcgttttcactgacgttcggcagggtggtttgattagatgccatcttcaaattcctctttctgtgccgcaggttgagtcggttcaggagatttacgcagcaagtcgatcagcgccatcgccagcgcagcggcagcaatagccagcactggtaacttgagccaggcggcggcaacaaagcccaggatgaagtaggggatgtagacgtttttcatcatgattttcagcagcacggcaaaaccgattgctggcatgatgccgcccgcgacgccgaggccgtcgattaatcgttgcggcaggacatcaatgatggtttttgcatgttccgcgccgaagtagataggcaggaaagcgcagagaaaatagaaaatgccgagtgccagcagtgccagatagttcacgcgttcaatgccgcgagtatcggcgttctccgccatccggtcgcagcgagacatcacgccggacatcaccgagaacaggaaggtaatccccatctgtactgcgacagcgaaaggtacggcgacacctactgcgacatcgggtttcacgccagtagtaatggcaaacgccgtgccgacgatagtaccgataatcacgttaggcggctgtgcgcccgccagcggggccagccccatccacaccagttccagcgtaccgccggttaaaattccggtatgcagatcgccaagtaccagcccgaccaacgggccgaggaccaccgggcggtgcatatgggttaggccgttaaacatatccaggccagcgataaaggcgataatgcccaacgcaaatgcctgcaacaggctgatttccatgatgaatccctcaaagtaatttaaagaggtccacagcaggctctgtcgggacgccctgaacgaagcattccaccccagcggttttcaggtcgttaaatgctgcgatatcgcccgcatccacagaaaccgttttggcgatttgttgtttgccattggcgtagtgcatattgccaacgttaatgcgattcaccggaacgccacctttcaccagcgtcaggaaatcggcgggtgttttacaaaccagcaggattttctgtcgatcggcggcgcgatgaatgttgtcgataactttttgcagcgtccagaaacgtacggcgatcccttctgccagtaccatttccatcaggttttgttgtaccggatcttcggcaacctcatcgttggctaccagcaccagatttgcccccgcaaatccgacccattgaacgccgacctgaccgtgaatcaagcgttcatcaatccggcttaaaacaatatttggcatagcgtgttcctctttgttttgcttattggccttcacaggctgtgtggtactgcgccaggatgtcctgaatatggttgataatgagttcccgtggcgttggctgcagctcgccggagcgaactttcacgtactgcagcggcagatactggctgatcagcggcagcggaattggtgaatccgccagattacgtaccagatgagcgaaagcgtcatcaatctggctgtccggccagtaatagcgcacgcgatccgagtagctataaccacgcgccagacgacgcgcgttgccgtcaccgtggtagtggctttgccagtattccgggcggtcgagcatcacgtcttccagcacctgacgcagaccagaacaggctttcgctggcaccagttcttcttcaatcgccgccagagagaacagagcttcacgcagggcgaaggtcagcgctgggccaactttcagaatggcaaagtggtcaatcaccagctggcgcagcgattgcggcgtttgataatcggtagagtgcgcttcgaaaatcagcgtttcgtagttttcgaccatctggcttaaggcgctcgctttggcgggctgataatcaataacgttggtgtgatcgaattcgacgccgggttgaaccaccagggcaatgatgcgtggccagatggcattcaaaccttgcttttcaaaggcgtgacgatgggcttccagcgtggcgcgggcggcatccggcgtggtgaccgccagctcgcttaaggtttcatgcgcgccgccaggtaccggcacttcggtaccaatgacatactccagatcggcttcgccaaagtgttcaagacaggtttcttccgccactttcgccagacgggcggcgcgttcagccacgatgtcatcagttaagggaatcggatcgtcctgacaggacatgctgcaatcaaggtggatttttttgaatcctgccgcaacgtagcttttaatcaaatcatcggcattggccattgcctgagcggccggcaggttttgccagcggtttggccccagatggtcaccacccagaatcaacgcatcctgcgggaaattcaacgagtcggcgagctgacaaacaaagccgcgaaaatcggcgggcgtcattccggtataaccgccgaactggtctacctgattggaggttgcttcaatcagtaacggcgtttggtttgcactggcgtagcggattgcagcctccagcaccagcggatgtgcggaacaaacggcataaattccatttgttttgcccgctttgtgctgtctcaccatttctgtcagatgtttcactttcctctccagttcagattactgcgatattaatctttcgttttgtttcagttgatactgcgtcatggtgagataaaaataaaacgaaagataatagttttctgatctgattcacaaaagaaacataatgaaagtcactgaaacgagagtagcttgcgtcaatgggcaaagtgggcttgcatttgcttaatagaaaggcgttaataggcaaaacgaaatgaaacgaaagttttacgaaaggacttactatgagtaataccgacgcttcaggtgagaagcgagtgactggcaccagcgagcgacgagaacagatcattcagcgtctgcgacagcaagggagtgtgcaggttaacgatctgtcggcattgtatggcgtatctactgtgacgatccgcaacgatctggcgtttctggaaaagcaggggatcgctgtgcgtgcctatggtggcgcgttgatctgcgatagcacgacgccgtcagtcgagccatcagtggaagataaaagcgcactgaacaccgcgatgaaacgcagcgttgcgaaagctgccgttgagttgattcagccaggtcatcgggttatcctcgattccgggaccaccacttttgagattgctcgtctgatgcgcaagcacactgacgtaattgcgatgaccaacggtatgaacgtggctaatgcgttgctggaagcggaaggcgttgagctgctgatgaccggcgggcatttgcgccgtcagtcgcaatctttttacggcgatcaggctgagcaatcgctgcaaaattaccacttcgatatgctgtttcttggtgtagatgcgatcgatctggagcgcggcgtcagcacacataatgaagatgaagctcgtttaaaccgtcggatgtgcgaagttgcggaacggatcatcgtggtcaccgattccagtaagttcaatcgttccagtttacataagatcattgatactcaacgtatcgacatgatcattgttgatgaaggcattcctgcggatagcctggaaggactgcgaaaggctggggttgaagtgattctggtcggagagtgagaaaggatgcccgctggtcaacacgaatgcgttcggcgggcattgtgaacaccatcaatgggtttcttctgtttctcgggtgagggtttcccagtcggcaggaggatgtcctctttttaacattttgctgaatacggtataggcatctgtttttttaccgtaggtgcgcagagtgttttcatcgttcatccatcccagaatgatgactttctctttttcactataacgaaagaagagacgataacgaccagcaccaaattttacccgtgaccagtctttatttttcccagagcctaacgacttgccatgacggaatgccggtgatgatggattgaccgtgatatgctcctcaatcactttatggactaccgccaataactttgtggcggcttttctctgataattttcaggatcttttccctttaatgtctcgacttcggcaactaaagcgtcgtaggtttcctgaaaacagggatgagcatatagcgcccaaccattaaccctttgtggaaaatccattattcgtcgtcgccaatctcatcatcaatgttgacgtccatgccagcgacaagtttctttccttgttgaatgttgaatggacgagttttttgcgggttgttctggatatctgcatccagaaaacgcaaaaatgcattcatagtatgatcctcctgttcatctcccagtcggcacataaatacttgcccaccaggcagaatttcgtaatgaatgctgtcctggcctggcttcagttttaaggcctcacgcactggcgcggggatagttgtttgtccgcgtatcgtgacctttgattcagtggtcagtacagcgtgagagcgagcattagcgggcatgattcactgtccttttacagcctgttttctgctcaaattataagcttgaactaaggtaatgcaaatgcattattaatggacgtgggggctttaaacaataaaaacatggcactaaggccatgttttgcgagggacgttccaaaagaaatcaggtcaccggtgccgggttaaacaccgccagctggttatgcagcccccattgatccgagaaggttttcttcttcccactggcgacgtcgagaataaagtggaacaacttccagcccacctcttcaatagtttcttcgccggtagcgatggtgcccgcattaatatccattaaatcaaaccagcggttcgccagctcggtgcgggttgccattttaatgacgggtaccgccatcaggccgtacggcgtaccacgaccggtcgtaaacacttgcactgtgatacccgaagccacctgttgcgtgccacagacaaaatcgctggctggcgtcgcggcgtaaattaatccgcgtttagtcgggcgttgaccgggcgacagcacttcaacaattgcgcttttacccgatttagcaatggagccgagtgccttctctaccacgtttgccagaccgcctttcttgttgcccggcgaagggttggcgctgcggtcggtttttcccatattgagatagttatcgtaccactccatctcctccagcagccgtttgccgacctcttcgttcactgcgcgtggtgtcagcagatggatcgcgtcacgcacttccgttacttctgaaaacatcaccgttgcgccgcagcgcaccagtagatcagacgcatagccaaccgccgggtttgccgttacaccagaaaacgcatcgctgccaccgcactgcataccaacgaccagttctgaagccgggcaggtttctcgctgccgttgattcagtttttgtagatggcgttcggcgatctgcaaaatatcctcgaccatggactgaaaaccgacatgcttttcatcctgcaaactgacaatgctggcgctttctactggaatagcttgcacatcatccgttccagtcagcaggcgctcaggctgcaacttttcacaacccaggccaatcaccattacttcgccgccaaagttaggattcagcgaaatattgtgaatggtacggataggtacaactgccgccggtgcgttaatcgccacgccacaaccgtacaaatgattcagccccaccacgccatcgacgttcgggtatttcggtagcagatcgcgttcaatgatttttactacatagtccaccacgcctgccacacagtggacgctggtggtgataccgagcaggtttttggtgcccacgctgccatcggcattgcgatagccctcaaaggtgtatccttccagcggcggtaagggttccgggactttggttgccagtggcagcgtgtataacggcggcgcttccggtagtacaaccattgattcgtcgatccagcttccgcgtgggattgcacgcacggcgtaaccaatcacttcgccataacgaataatttcaccattagccggaatgtccagcaatgcgactttatgcccctggggaatatgttcaattaattccagcccatccggaaaacgcgttcctgctttcaggccattatcattaacaataattgccacattatctgtgtcgtgaacttttatataaaacgcagttggcgtttcttgtctgatttcgatgttggccattgtgcaatattctccagccaggggttattaaaatgaggacctggtctcatttaaaaataaatgacttcattgggtgaaataagaatgtcaggagtttaaacgcagaaatgtgatcaatgtcaatcatttcagggattgcagtgccgcccggtaaggtaaagcgcaaatctgtgctttagcgcgcaaccttatgtgcatatgctcaaaataatatttaaatagtattaattaaattagcatttgcacaatgattattattctcgcgctgcttatactaattcccgagttcattgtcgttacggcataaatgaaactcataaataacaccttccccataataataaaaatcagcataagtacccgaggtaaataaaatgattctggacaccgttgacgaaaaaaagaaaggcgtgcatacccgctatttaatattactgattatttttattgttaccgccgttaactacgccgatcgtgcaacgctgtctattgctggtaccgaagtggcaaaagagttgcagttaagtgcggtttcgatgggttacatcttctccgcttttggctgggcctacttgctgatgcaaatccccggcggctggctgcttgataagtttggctcgaaaaaagtttacacctacagcctctttttctggtcgctattcaccttcctgcaaggctttgttgatatgttcccgctggcctgggcagggatctccatgttctttatgcgctttatgctcggcttctcggaagcgccatcattcccggcgaacgcccgaattgtcgccgcctggttcccgacgaaagaacgtggtactgcctccgccatctttaactcggcgcaatatttctcgctggcgctcttttcgccgctgcttggctggctgactttcgcctggggctgggagcacgtctttaccgttatgggggtgattggttttgtgctgacggcgctgtggatcaagttgattcataacccgacagatcacccacgtatgtctgcggaagagctgaagtttatctctgaaaatggcgcggtggtcgatatggaccacaaaaagccgggcagtgcggcagcaagcggacccaaactgcattacatcaagcaattgctctctaaccgcatgatgctgggcgtatttttcggacaatattttatcaacaccatcacctggttcttcctcacctggttcccgatttatctggtgcaggaaaaaggcatgtcgattctgaaagtgggtctggtcgcctcgattccagcactgtgtggttttgcgggcggcgtgctgggaggtgtcttctcggattatctgatcaaacgcggtttatccctgaccctggcacgtaagctaccgattgtgctgggaatgttgctggcttccaccatcatcttatgtaactacaccaacaacaccacgctggtggtcatgctgatggcgctggctttctttggcaaaggatttggtgcgctgggctggccggtgatttctgacaccgcgccgaaagagattgttggcctctgcggcggcgtctttaacgtctttggcaatgttgcctccattgtcactccactggtgattggctacctggtaagtgaactgcactccttcaatgcagcactggttttcgtgggatgttcagcgctgatggcgatggtctgctacctcttcgtagttggcgacattaaacgtatggaattgcagaaataagcaaaggtataagcgatgaataacgatgttttcccgaataaattcaaagccgcactggctgcgaaacaggtacaaattggttgctggtcagcactctctaacccgattagcactgaagttcttggtttggctgggtttgactggctggtgctggatggcgaacatgcgccaaacgatatctccacgtttattccgcagttaatggccttgaaaggcagcgccagcgcgccagtagtgcgagtgccgaccaacgagccggtaattattaagcgtcttctggatatcggtttctataacttcctgattccttttgtagaaacaaaagaggaagcagagctggcggtggcatcaacccgttacccaccggaaggcattcgcggcgtctccgtttctcaccgcgccaatatgtttggcaccgtggcggattatttcgctcagtcgaacaagaacatcactattctggtccagatagaaagtcagcagggcgtagataacgtcgatgccattgccgctaccgaaggcgtagacggcatcttcgtcggccccagcgatctggccgcggcattaggccatctcggcaatgcatcacacccggatgtacaaaaagcaattcagcacatttttaaccgtgccagcgcgcacggcaaacccagcggtatcctcgcgccggtcgaagccgatgcgcgtcgttatctggaatggggcgcgacgtttgtggctgtcggcagcgatctcggcgtcttccgctctgccactcagaaactggctgatacctttaaaaaataaccaccaccgcaacaagagagatgattgatatgactatgaaagttggttttattggcctggggattatgggtaaaccaatgagtaaaaaccttctgaaagcaggttactcgctggtggttgctgaccgtaacccagaagctattgctgacgtgattgctgcaggtgcagaaacagcgtctacggctaaagcgatcgctgaacagtgcgacgtcatcataaccatgctgccaaactcccctcatgtgaaagaggtggcgctgggtgagaatggcattattgaaggcgcgaagccaggtacggtattgatcgatatgagttctatcgcaccgctggcaagccgtgaaatcagcgaagcgctgaaagcgaaaggcattgatatgctggatgctccggtgagcggcggtgaaccgaaagccatcgacggtacgctgtcagtgatggtgggcggcgacaaggctattttcgacaaatactatgatttgatgaaagcgatggcgggttccgtggtgcataccggggaaatcggtgcaggtaacgtcaccaaactggcaaatcaggtcattgtggcgctgaatattgccgcgatgtcagaagcgttaacgctggcaactaaagcgggcgttaacccggacctggtttatcaggcaattcgcggtggactggcgggcagtaccgtgctggatgccaaagcgccgatggtgatggaccgcaacttcaagccgggcttccgtattgatctgcatattaaggatctggcgaatgcgctggatacttctcacggcgtcggcgcacaactgccgctcacagctgcggttatggagatgatgcaggcactgcgagcagatggtttaggaacggcggatcatagcgccctggcgtgctactacgaaaaactggcgaaagtcgaagttactcgttaatgacgtcgtgcccggatggcgtattgcaatccgggcctggaatccaggccgaataagagaaacgccctccggcgtatgtggtaacaggcataggtatgaaaatcgtaatcgccccagactcttataaagaaagtttatctgccagcgaggttgcgcaggcgatagaaaaaggatttcgggaaatttttcctgatgcacagtacgtttctgttccggttgccgacggtggcgaaggaacggtggaagcgatgattgcagccacccagggggctgaacgtcacgcctgggttacagggccgctgggcgagaaagtgaatgccagttgggggatctccggcgatggcaaaaccgcgtttattgaaatggcggcggccagtgggctggagctggtacctgcggaaaaacgcgatccactcgtgaccacttcacgcggcacaggcgagttaatcctgcaggcgctggagagcggtgcgacaaacattattatcggcattggcggcagcgctacaaatgatggcggcgcaggcatggtacaggcgctgggggcgaaattatgcgacgccaacggcaatgaaattggttttggcggcggtagtcttaatactctgaatgatattgatatttccggcctcgatccgcgcttaaaagattgcgtcattcgcgtcgcttgtgatgtcaccaatccgctggtgggcgataacggcgcatcgcgcatctttggcccacaaaagggagccagtgaagcgatgattgttgagctggacaataacctctctcactatgccgaggtcattaaaaaagcgctgcatgttgatgtgaaagatgtccccggtgcaggagctgcgggtggtatgggcgcggcgctaatggcgtttcttggtgcggaactgaaaagtggtattgaaatcgtcactacggcgctgaatctggaggaacatattcacgattgtacgctggtgatcaccggtgaagggcgtattgacagccagagtattcacgggaaggtaccgattggtgtcgcaaacgtggcgaagaagtaccataaaccggtgattggcattgcgggtagcctgaccgatgatgttggcgttgtacatcagcatggcattgatgcggtcttcagcgtattgaccagcataggtacgttggacgaagcattccgcggggcttatgacaatatctgccgtgcttcacgtaatatcgccgcgacactggcgattggaatgcgcaacgcggggtgacaagggcgcgcaaaccctctatactgcgcgccgaagctgaccagacagtcgccgcttcgtcgtcgtcctcttcgggggagacgggcggaggggaggaaagtccgggctccatagggcagggtgccaggtaacgcctgggggggaaacccacgaccagtgcaacagagagcaaaccgccgatggcccgcgcaagcgggatcaggtaagggtgaaagggtgcggtaagagcgcaccgcgcggctggtaacagtccgtggcacggtaaactccacccggagcaaggccaaataggggttcataaggtacggcccgtactgaacccgggtaggctgcttgagccagtgagcgattgctggcctagatgaatgactgtccacgacagaacccggcttatcggtcagtttcacctgttttacgtaaaaacccgcttcggcgggtttttacttttggaggggcagaaagatgaatgactgtccacgacactatacccaaaagaaagcggcttatcggtcagttttacctgatgtacgtaataaaccgttccggcgggtttcagattgttgagtgcgctttattcatgccggatgcggcgtgaacgccttatcctgcctacaaaagcacgcaaattcaatatattgcagagatggcgtaggcctgataagcgtagcgcatcaggcatttttgcggttgccatcagtttcaaacccgcgtcagtgagtttttgcttttggtgcacagggtaagatgaataaatatctacggtattaataatagactttgtaagaagttattaagtctatattgcatttaaaaggtcgtaatcatacgtatagtcctctctggtaaaatattgcttctctgagttatatgcttcatatgtgttatattccccgacctcaaagccattgtccggagaattttcgtctttctcgatggtattatctgaaagtaactcttctgagctagagtcttctatgtttaaatccatagtataattaatttgggggacgaccagataagcattttctttgatattttcataatcttcaatgattatatcgatgtaatcatatattttttctgatgagaattctttcatctctggtaatttaattctgttcaagcaattgatgattttcgatgagcttttatatatttcttttgttaattcattttctaatttatctgtaagagttgcccttggtatagattttataattgcaaatctcataatttttaattgttcttcggtaatgtctccaggctcatttaaacaactttcgacaaacttaattttttcttcagaatacatatcgctaatgcttattaaaacaggcgttatttttagtaaataatcccaggagattgtggcgttttgtgttgaactaacaaaattaacctgaaacatgttggcattagtaaaatttgttgaattcaatttaaaaggatttaaaatagtattagccatatgtttatctgtgaaatcataataatctaaatcgacattacgtaagtccagagaggatagatcaacgatatctccagttccacaactaaaaattacgtttaacctcctgatttcattgtaaatatcttttaatgggcaattaatattgatattacctgtggatatttcctggttttttaacggttcattaatggtaagttcacaagtattgtccgatcgttgaataatttgggcgttataacctaaaaaatccagacgaagagacgagacattataaagaattacattttgtaagtacgctaattctttttgaaaatcaccagtgataatgcattttccaccaggttgtaacgtgttaagtaaagtgaccatttcaatagaggtctgttttagtttttctatacctggtgctagtgcttcgaggttatttcctgttgggctttcaggaaggtcattcatttttcgacggactaaatcactactaatatcattaccaattgatgaaacagggaacattattttatcctttataaataatcaataaaaatcattattaaaatgatcgggtgaaaaaaagagaatttgccaacaatctgaagtaatgctggttttattaaagtgcacaaggggggttaagatggcttcttttcgggtgaattttgcacaatacttagaaatcgtctccttaatacattccagctcttttttattgacggctgagcaagtacattgttcaccaaaaggtgcaaaagtgcctacatctaatgtttgtatgatataatcatcatgttctcctgtagaaatatctataatgaatggactcatattttccggttggattcggatcatgacagaaggaacatcgccatgatagaaattcaatgcagttattgcagataatactctccgcagttcattacttatactgtaaattttattaacgtcattggtggagacaatttctgcaaactttctttttaccgtccaataatcaatatttctattgtgattgttaaccactgcgtgcattggcgggattgaagggtgaaaaatatgcgcaattgggaagcctttcattgatgcctgccttgtcatcatgacaaacaataatagatgcttattttcctcgcagggttctttcgcactatcaaaaaacgctcatttacccggcgttacagtaaacgaagcaacattctgtggcctacgccgatcaaaagctctgtgaaaatttcccttgttgtctttgtctgaccttatcgcggcgatcagcaattattcgttttgtgatcctcaacacaaaatgctattcgtcgcctatgaggggagaagaatttatggaaaacgattgcattcacaaaatgacgtcctgtcagaagagaaaaagttgacgttaatcaattgttcgagatgatcaatacatgtattcgaaattttaaaatattgataaaataaatgtttgttctccaacaaatagcgtgaaaaaatgtgacatgccgcattatttatcactgaaaatggtttatttataataaaatttgagaacttgctcattaaatttaactcaaattttgcctggtaattatccggtaattgcttgaaatatggtctcagccccttttttgtattaaccacataacgaatgatgttatcgccataaaatatggttatccccgtcattttttttgacaaaaatcagggtttatgctgatttttatactttaacttgttgatatttaaaggtatttaattgtaataacgatactctggaaagtattgaaagttaatttgtgagtggtcgcacatatcctgttcatttcattttgatacacttcatgccgtcaatgaggtaattaacgtaggtcgttatgagcactattcttcttccgaaaacgcagcacctggtagtctttcaggaagtcattagaagtggttctatcggctcggctgcaaaagaattagggttaactcaaccggccgtcagtaaaatcattaacgatattgaagattattttggtgtggaattagtggtgcggaaaaataccggtgtaacattaacacctgccggtcaattgttactctcccgttccgaatccattacccgtgaaatgaaaaatatggttaatgagataagcggtatgtcttctgaggcggtggtggaagtctcatttggttttccttcattgattggttttacttttatgtcagggatgatcaacaagttcaaagaggtgttcccgaaagcgcaggtttctatgtatgaagcgcaactgtcttcgttcttaccggcaatccgcgacggtcgactggattttgcgattggtacgttaagtgcagaaatgaagcttcaggatttacatgttgagccgctgttcgagtccgagtttgtgctggtagccagtaagtcccgaacatgcaccggcaccaccacgctggagtcgttgaagaacgaacagtgggtgttgccacaaactaatatggggtactacagcgaactgcttactacgttacaaagaaatggcatcagtattgaaaacatcgttaaaaccgactcagtcgtgacaatttataatcttgttctcaatgctgatttcttaactgtaattccttgtgatatgacgtcaccttttggttctaatcaatttattactattccggttgaagaaacattacctgtggcacaatatgccgcggtatggtcgaaaaattatcgtattaaaaaagcagcatcggttttggtggaattagccaaagagtattcatcttataatgggtgtagacgaaggcaattaatagaagttggttagttatttgtttttatttaaacataaataatccacctgtctgtcttgcaggtgtcggttacggttacctacatatttaattcaggcgaagaggttttataatgcatattacatacgatctgccggttgctattgatgacattattgaagcgaaacaacgactggctgggcgaatttataaaacaggcatgcctcgctccaactattttagtgaacgttgcaaaggtgaaatattcctgaagtttgaaaatatgcagcgtacgggttcatttaaaattcgtggcgcatttaataaattaagttcactgaccgatgcggaaaaacgcaaaggcgtggtggcctgttctgcgggcaaccatgcgcaaggggtttccctctcctgcgcgatgctgggtatcgacggtaaagtggtgatgccaaaaggtgcgccaaaatccaaagtagcggcaacgtgcgactactccgcagaagtcgttctgcatggtgataacttcaacgacactatcgctaaagtgagcgaaattgtcgaaatggaaggccgtatttttatcccaccttacgatgatccgaaagtgattgctggccagggaacgattggtctggaaattatggaagatctctatgatgtcgataacgtgattgtgccaattggtggtggcggtttaattgctggtattgcggtggcaattaaatctattaacccgaccattcgtgttattggcgtacagtctgaaaacgttcacggcatggcggcttctttccactccggagaaataaccacgcaccgaactaccggcaccctggcggatggttgtgatgtctcccgcccgggtaatttaacttacgaaatcgttcgtgaattagtcgatgacatcgtgctggtcagcgaagacgaaatcagaaacagtatgattgccttaattcagcgcaataaagtcgtcaccgaaggcgcaggcgctctggcatgtgctgcattattaagcggtaaattagaccaatatattcaaaacagaaaaaccgtcagtattatttccggcggcaatatcgatctttctcgcgtctctcaaatcaccggtttcgttgacgcttaattaattcgttgaggataggatatgagtacttcagatagcattgtatccagccagacaaaacaatcgtcctggcgtaaatcagataccacatggacgttaggcttgtttggtacggcaatcggcgccggggtgctgttcttccctatccgcgcaggttttggcggactgatcccgattcttctgatgttggtattggcataccccatcgcgttttattgccaccgggcgctggcgcgtctgtgtctttctggctctaacccttccggcaacattacggaaacggtggaagagcattttggtaaaactggcggcgtggttatcacgttcctgtacttcttcgcgatttgcccactgctgtggatttatggcgttactattaccaatacctttatgacgttctgggaaaaccagctcggctttgcaccgctgaatcgcggctttgtggcgctgttcctgttgctgctgatggctttcgtcatctggtttggtaaggatctgatggttaaagtgatgagctacctggtatggccgtttatcgccagcctggtgctgatttctttgtcgctgatcccttactggaactctgcagttatcgaccaggttgacctcggttcgctgtcgttaaccggtcatgacggtatcctgatcactgtctggctggggatttccatcatggttttctcctttaacttctcgccaatcgtctcttccttcgtggtttctaagcgtgaagagtatgagaaagacttcggtcgcgacttcaccgaacgtaaatgttcccaaatcatttctcgtgccagcatgctgatggttgcagtggtgatgttctttgcctttagctgcctgtttactctgtctccggccaacatggcggaagccaaagcgcagaatattccagtgctttcttatctggctaaccactttgcgtccatgaccggtaccaaaacaacgttcgcgattacactggaatatgcggcttccatcatcgcactcgtggctatcttcaaatctttcttcggtcactatctgggaacgctggaaggtctgaatggcctggtcctgaagtttggttataaaggcgacaaaactaaagtgtcgctgggtaaactgaacactatcagcatgatcttcatcatgggctccacctgggttgttgcctacgccaacccgaacatccttgacctgattgaagccatgggcgcaccgattatcgcatccctgctgtgcctgttgccgatgtatgccatccgtaaagcgccgtctctggcgaaataccgtggtcgtctggataacgtgtttgttaccgtgattggtctgctgaccatcctgaacatcgtatacaaactgttttaatccgtaactcaggatgagaaaagagatgaatgaatttccggttgttttggttattaactgtggttcgtcttcgattaagttttccgtgctcgatgccagcgactgtgaagtattaatgtcaggtattgccgacggtattaactcggaaaatgcattcttatccgtaaatgggggagagccagcaccgctggctcaccacagctacgtaggtgcattgaaggcaattgcatttgaactggaaaaacggaatttaaatgacagtgtggccttaattggccaccgcatcgctcacggcggcagtatttttaccgagtccgccattattaccgatgaagtcattgataatatccgtcgcgtttctccactggcacccctgcataattacgccaatttaagtggtattgaatcggcgcagcaattatttccgggcgtaactcaggtggcggtatttgataccagtttccaccagacgatggctccggaagcttatttatacggcctgccgtggaaatattatgaagagttaggtgtacgccgttatggtttccacggcacgtcgcaccgctatgtttcccagcgcgcacattcgctgctgaatctggcggaagatgactccggcctggttgtggcgcatcttggcaatggcgcgtcaatctgcgcggttcgcaacggtcagagtgttgatacctcaatgggaatgacgccgctggaaggcttgatgatgggtacccgcagtggcgatgtcgactttggtgcgatgtcctgggtcgccagccaaaccaaccagagcctgggtgacctggaacgcgtagtgaataaagagtcgggattattaggtatttccggtctttcttcggatttacgtgttctggaaaaagcctggcatgaaggtcacgaacgcgcgcaactggcaattaaaacctttgttcaccgaattgcccgtcatattgccggacacgcagcttcattacgtcgcctggatggaattatattcaccggcggaataggagagaattcaagcttaattcgtcgtctggtcatggaacatttggctgtattaggcttagagattgatacagaaatgaataatcgctctaactcctgtggtgagcgaattgtttccagtgaaaatgcgcgtgtcatttgtgccgttattccgactaacgaagaaaaaatgattgctttggatgccattcatttaggcaaagttaacgcgcccgcagaatttgcataatttagttgaagtattgtagagagattatttttcatgaaggtagatattgataccagcgataagctgtacgccgacgcatggcttggctttaaaggtacggactggaaaaacgaaattaatgtccgcgattttattcaacataactatacaccgtatgaaggcgatgaatctttcctcgccgaagcgacgcctgccaccacggaattgtgggaaaaagtaatggaaggcatccgtatcgaaaatgcaacccacgcgccggttgatttcgataccaatattgccaccacaattaccgctcatgatgcgggatatattaaccagccgctggaaaaaattgttggcctgcaaacggatgcgccgttgaaacgtgcgctacacccgttcggtggcattaatatgattaaaagttcattccacgcctatggccgagaaatggacagtgaatttgaatatctgtttaccgatctgcgtaaaacccataaccagggcgtatttgatgtttactcaccggatatgctgcgctgccgtaaatctggcgtgctgaccggtttaccagatggctatggccgtgggcgcattatcggtgactatcgccgcgtagcgctgtatggcatcagttatctggtacgtgaacgcgaactgcaatttgccgatctccagtctcgtctggaaaaaggcgaggatctggaagccaccatccgtctgcgtgaggagctggcagagcatcgtcatgcgctgttgcagattcaggaaatggcggcgaaatatggctttgatatctctcgcccggcgcagaatgcgcaggaagcggtgcagtggctctacttcgcttatctggcggcagtgaaatcgcaaaatggcggcgcgatgtcgctgggccgcacggcatcgttcctcgatatctacattgagcgcgactttaaagctggcgtactcaatgagcagcaggcacaggaactgatcgatcacttcatcatgaagatccgtatggtacgcttcctgcgtacaccggaatttgattcgctgttctccggcgacccaatctgggcgacggaagtgatcggcgggatggggctggacggtcgtacgctggtgaccaaaaactccttccgctatttgcacaccctgcacactatggggccggcaccggaacctaacctgaccattctttggtcggaagaattaccgattgccttcaaaaaatatgccgcgcaggtgtcgatcgtcacctcttccttgcagtatgaaaatgacgatctgatgcgtactgacttcaacagcgacgattacgcgattgcctgctgcgtcagcccaatggtgattggtaagcaaatgcagttctttggtgcacgcgctaacctggcgaaaacgctgctctacgcaattaacggcggggtggacgagaagctgaagattcaggtcgggccgaaaacagcaccgctgatggacgacgtgctggattacgacaaagtgatggacagcctcgatcacttcatggactggctggcggtgcagtacatcagcgcgctgaatatcattcactacatgcacgacaagtacagctacgaagcttcgctgatggcgctgcacgatcgtgatgtctatcgcactatggcatgcggcatcgcgggcctgtcggtggcgacggactccctgtctgccatcaaatatgcccgcgtgaaaccaatccgtgacgaaaacggcctggcggtggactttgaaatcgacggtgaatatccgcagtacggcaacaacgacgagcgcgtagacagcattgcctgcgacctggttgaacgctttatgaagaaaattaaagcgctgccaacctatcgcaacgccgtccctacccagtcgattctgactatcacttctaacgtggtgtacggccagaaaaccggtaatacgccggacggtcgtcgcgccggaacaccgttcgcgccgggcgctaacccgatgcatggtcgtgaccgcaaaggtgccgtggcctcattgacgtcggtggcgaaactgccgttcacctacgccaaagatgggatctcgtacaccttctcaatcgttcctgcggcgctgggcaaagaagatccagtacgtaaaaccaaccttgtcggcctgctggatgggtatttccaccacgaagcggatgtcgaaggcggtcaacacctcaacgtcaacgtaatgaatcgggaaatgctgctggatgccatcgagcacccggaaaaatatcctaacctgacaatccgtgtctctggctacgccgtgcgcttcaacgcactgacccgtgaacagcaacaggatgttatttcacgtacctttacccaggcgctctgacgccggaggatgtatgaaaaagattatcgaaacgcaacgtgccccaggcgcaatcggcccttatgttcagggcgttgatttaggcagcatggtcttcacctccgggcaaataccggtttgcccacagaccggtgagatcccggctgatgtgcaagatcaggcgcgtttaagcctcgaaaacgtcaaagcgatcgtggttgctgccgggctgagcgtgggcgatatcatcaagatgaccgtgtttatcaccgatctgaatgattttgccaccatcaacgaagtctataagcagttcttcgatgagcatcaggcgacctatccgacccggagctgtgtgcaggtcgcgcgtttgccgaaagatgtgaagctggaaattgaagccatcgcagtacgtagtgcgtaaagcctcgtgagcgggacggtcgtaaggtcgttccgctccacttcactgaacggcaatccgagggtgtggatatgattagtgcattcgatattttcaaaattgggattggtccctccagttcgcataccgtggggccaatgaatgccggaaaaagttttattgatcggctggaaagtagcggcttattaaccgcgacgagccatattgtggtcgatctgtacgggtcgttgtcactgacgggcaaaggccatgccacggatgtcgccatcatcatgggactggcaggaaacagtccgcaggatgttgtcattgatgagatccctgcatttatagagttagtaacgcgcagcgggcggctgccagtggcatctggtgcgcatattgttgattttcctgtagcaaagaacattatcttccatcccgaaatgttgcctcgccatgagaacggaatgcggatcactgcctggaagggacaggaagagctattaagtaaaacctattactctgtcggcggcgggtttattgtcgaagaagaacacttcggcctgtcgcacgatgtcgaaacgtccgtaccttacgatttccactcagcaggtgaactgctgaaaatgtgtgattacaacggcctgtctatatctggtctgatgatgcacaacgagctagcgctgcgcagcaaagcggaaattgacgccggttttgcccgtatctggcaagtgatgcatgacggtattgaacgtgggatgaacactgaaggcgtgctgcctggtccgctcaatgtgccgcgccgtgccgtagcgctgcgtcgtcagctggtttccagcgataacatctctaacgatccgatgaatgtcatcgactggatcaacatgtacgcgctggcggttagtgaagaaaacgcagctggcgggcgcgtggtaacggcaccgactaacggtgcgtgcggcattattccggcagtactggcttattacgataagttccgtcgtccggtaaacgagcggtcaattgcccgctattttctggccgcgggggctattggcgcgctgtataaaatgaacgcctccatctctggcgcggaagtcggctgtcagggggagattggcgtggcctgttcaatggcggcggcagggttaactgaactactgggcggcagtccggcgcaggtatgcaatgcggcggaaatcgcgatggagcataaccttgggctgacctgcgatccggttgccggacaggtacaaatcccgtgcattgaacgtaatgccattaatgccgtgaaagcagtaaacgccgcgcggatggcgatgcgccgcacctcggcaccgcgtgtttcactcgataaagtgatcgagacgatgtatgaaaccggcaaagatatgaacgataaataccgcgaaacatcacgcggaggactggccattaaagtggtctgcggctgacattgctgtcagctttcatccttgggtgcacaaatgtgcaccttttttttgtgatctgccgcaaatagagaatgaatattctcctgcgattaatttagtagaaaattcttatccatctccgttatttcaaagtcttgattgtgaagattttctctgacctcgcgcgtatcatttctttattctaataactcgcctgcaaaaacgtagaccgcatatcgccttgatgcggctcggaaaaaaataataagccctacaaaatattgagcgagaaattatggaaattgcatcgaataaaggcgtcattgcagacgcttcgaccccggcgggtcgtgctggaatgagtgagagcgagtggcgagaagcgatcaaattcgacagtactgacaccggctgggtgattatgagtatcgggatggcgattggcgcggggattgtttttctcccggtgcaggtcggtttgatgggattgtgggtatttttgctctcatcggtgattggttacccggcaatgtatctgtttcagcgattgtttattaatacgctggcagaatcaccagaatgtaaagattacccgagcgtcattagcggttatttaggtaaaaactggggcatcctgttaggtgcgctctatttcgtaatgctggtgatttggatgttcgtctattccaccgccatcaccaacgatagtgcttcctacctgcataccttcggcgtgacggaagggttgctgtcagacagtcccttttatggtctggtactgatttgcattctggtggcgatctcctcacgcggcgagaaattgttattcaaaatttcgaccggcatggtgctgaccaagctgctggtggtcgcggcgctgggcgtgtcgatggtgggaatgtggcatctgtataacgtcggttcgctaccgccgctggggctgctggtgaaaaacgccattattacgctgccgtttaccctgacgtcgattctgtttatccagacgttaagtccgatggtgatctcttatcgctcgcgggaaaaatcaattgaagtggcgcggcataaagcattgcgggcaatgaatatcgcgtttggcattttgtttgtcaccgtctttttctacgccgtgtcgttcacgctggcgatgggacatgacgaagcggtaaaagcctatgagcagaatatttccgcgctggcgattgccgcacagtttattagcggtgacggcgcagcgtgggtgaaagtggtcagcgtcattctcaatatctttgctgtcatgactgcattctttggcgtctatttaggctttcgcgaagcaacgcaagggatcgtaatgaacatcctgcgtcgcaagatgcctgccgagaagattaacgaaaatctcgttcagcgcggcatcatgattttcgccattttgctggcctggagcgccatcgtactgaacgcaccggtgttgagcttcacctctatctgtagcccgattttcggcatggtagggtgcctgatcccggcgtggctggtttacaaagtaccagcattgcacaaatacaaagggatgtctctgtacctgattatcgtcactggtttgttgctgtgtgtttctccgttcctggcattttcttgatttacctgaaattttaaggtttttaatatgtttgattcgactttaaatccgttatggcagcgttacatcctcgccgttcaggaggaagtaaaaccggcgctgggatgtactgaaccgatttcactggcgctggcggcggcggttgctgcggcagaactggaaggtccggttgaacgtgtagaagcctgggtttcgccaaatctgatgaagaacggtctgggcgtcaccgttcccggcacgggaatggtggggctgccgattgcggcggcgctgggggcgttaggtggaaatgccaacgccgggctggaagtgctgaaagacgcaacagcgcaggcaattgccgatgccaaagcactgctggcggcggggaaagtctccgttaagatccaggaaccttgcgatgaaatcctcttctcacgcgccaaagtctggaacggtgagaagtgggcgtgtgtcaccatcgtcggcgggcataccaacattgtgcatatcgagacgcacgatggtgtggtgtttacccagcaggcgtgtgtggcagagggcgagcaagagtctccgctgacggtgctttccagaacgacgctggctgagatcctgaagttcgtcaatgaagtcccgtttgcggcgatccgctttattctcgattccgcgaagctaaattgtgcgttatcgcaggaaggtttgagcggtaagtgggggctgcatattggcgcgacgctggaaaaacagtgcgagcgcggtttgctggcgaaagatctctcttcatccattgtgattcgtaccagcgcggcatccgatgcgcgtatgggcggcgctacgcttccggctatgagtaactccggctcgggtaaccaggggattaccgcaacaatgcctgtggtggtggtagcagaacacttcggagcggatgatgaacggctggcgcgtgcgctgatgctttcgcatttgagcgcaatttacatccataaccagttaccgcgtttgtctgcgctgtgtgccgcaacgaccgcagcaatgggggccgccgccgggatggcatggctggtggatgggcgttatgaaaccatctcgatggcgatcagcagtatgatcggcgatgtcagcggcatgatttgcgatggtgcgtcgaacagctgcgcgatgaaggtttcgaccagtgcttcggctgcgtggaaagcggtgttaatggcgctggatgataccgccgtgaccggcaatgaagggattgtggcgcatgatgttgagcagtcgattgccaacctgtgtgcgttagcaagccattcgatgcagcaaacggatcggcagattatcgagattatggcgagcaaggccagataaacgccaggttttggggatcgtgccggatgcgatgctggcgcatcttgtccggcctacgggttgtttaattcgttaatgttgttggattttgtaggccggataaggcgttttcgccgcatccggcaacctgtctttacgcggtagcttcatcctcggctaaacgcgtttcagcatccgcgacgatagcttccagctcgctcaacatctcttcatagccaaaatttttggcggtgcgagcaggttctttcgccaccacgggcttcaccggctggcgctttttggccaattttttactcatcatcatctccctgtaaaaacaactagacaggcaaatctatcagcaaagcgcgcagtggggaatcggcaaccagcgtaatgttagcctcgtcacgaataaacgccccatcaccgcaggtcagcgccgctttctcttcatgatgcgtaagcgcatgaaatttcccgtgaatcgattgcaaatacgcgcgtggcccatgcaactggaaattcgcactttcgcctttgtcgagcacgatatggtgcagccacacttgctggcgtaattgcaggcttcccatcgcaccctctggcgaggcgattaattgctgcttgcccatattaagcgccagcttttgaatcagcggattctctcgctgcgggcaggcgtccagccaaagctgcattcgcgttaacggtttgtctttgctgagattgtgttcgctatagctgacacccggctgggtagagagcagcaacgcctctccggcgctggcctgaacatgattgccttcgctatcgcgatactctgcttctccatccagaatcacatttaaaatatcgactttgggataggttcgcggctgaaaggcggcacctggggccagcacttcctggttaagcacacgcagggaggcatagcctaacaatttcgggtcgaagtagtgtccaaaggaaaaagtataccgggcctgcaaccatccgtagtctgcttgtccacactgcctggcagttcgggtagtaatcataattcttgacctctctttacttccttttatggtaaggggctggacgctacattgttagccagatattctgcccggtatgttcaaatttcctgaatgagaacgaaatggccaaagaaagggcattaacgctggaagcactacgggttatggatgcgatcgatcgccggggcagttttgcggcggcggcggatgagctgggacgcgtgccttccgcacttagctacaccatgcaaaaactggaagaagagctggatgtggtgctgtttgaccgctcgggccatcgtaccaaattcaccaatgtcgggaggatgttgttggagcgagggcgcgttttgctggaagccgcagataaactgactactgatgcggaagctctcgcgcgcggttgggaaacgcatctcaccattgtgaccgaagcgctggtaccgacacctgcctttttcccgttaatcgacaaactggcggcaaaagccaatacccaactggcaatcatcacagaagtgctggcgggggcgtgggaacggctggagcaggggcgggcggatattgttatcgcgccggatatgcattttcgttcctcgtcggagatcaactcgcgcaagctctatacgttaatgaacgtctacgttgccgcgcctgatcacccgattcatcaggagccggaaccgttatctgaagtgacgcgtgtgaaatatcgtggaattgcggtggcggataccgctcgtgagcgcccggtgttgaccgtacagctgctggacaaacagccgcgcttaacggtgagcacgattgaagataaacgtcaggcattactggcggggcttggcgtggcgacgatgccgtatcctatggtcgaaaaagatattgcggaagggcggttgcgtgtcgtcagcccggaatcgaccagcgagatcgatattattatggcctggcgtcgtgacagtatgggggaagcgaaatcctggtgtctgcgggaaattcccaaactttttaacggaaaataatatttattattgttaataaaaaggggcgaaatatcgtcccaattctaagattaatttgaaccaaacttcggatcgtttccgtaacgattgctgccagaagtaccttctgtgcagaaaaaaaccagaagcacgagccagccaataaacggaacaaaaaagagcaaggcccaggcacctgaacggtcggtatcgtgtaagcgacggatagcaagcgcaaggacgggaaggaaggttgccagcaaataaagcatagacagatatggaagctccagacctaaaatcaattgaatgacattgataatagcgccgacgatggcgttaatcagagtaaacatccagtactctttacgacgtgcgcgaccagagaaaccaacataattttttaatacggacaaataccactgcataaaaacatccctttaattaaaagtgacgaaagtctattccgggtattgtgtaaatgctattcgtatctttctttttcggatgttataaaggttttgatatttaagataaatacatggttattttttataggtaatttatataacgacattgaaatattttaaataaacattagtaaattattcattcatcaacataatgataaaagccggatgagtcagacatccggcgagcagatttgttttaaggttccagttttggatctggtccaaagcggttttcgcctggcgtacccgcctggcagttaaagacgatgataataagccagccgataaacgggattaagaatagcagtgcccaccacgccgagcggtcggtgtcgtgcaggcggcggaactgaaccgcccaccacggtaaaaacaccagaataccgtagattgtcgtcaggatgccttcgccaccagcgcgttgccagcctaacattttatccagcagccccagcacgaacgtaaagatgatgttgaccagaataaacatccagtactctttgcgccgcgcacgaccccggaaaccgacataattttttagtactttcagataccagtccatttttgcctcaattttgctcaatcacttgtttttaaagcagcaaattaagaatagacgtgaatgaaatggcagtaaatattcgttcaaggaattaataaagtgccgtgaaggcgcgctaagactgatgacaagcgcaaaatcgccagatgcgctacgcttatctggtctgcgcgggttatgcaatctattgaatgtacaatgttttgtatgtcagataaggcgttcatgccacatccgacatgaacaacatgcacttagctaattatcagaggcacctcgtaaggtgcctttttttaaccgaagcgaacatctcgtccatgcggttcatcgagatcctgccacggaccaattgaaataatccccgtagggttgatggtcttatggctgcggaagtaatgattacggatatgatcgaaattgactgtttcggcgatccccggcatctggtagatatcgcgcagaaaaccgtacagattcaggtaatcgctgatgcggtgcttatcacacttgaagtgggtcacatacaccggatcaaaacgcaccagcgtagtccacaggcgaatatcggcttcggttagctggttgccggtcaggtaacgatgctggcctaaaatctgctccagtcgtgccagcgattcaaacactttcgccaccgcctcgtcgtaagcttcctggctggtggcaaaaccagctttatacacgccgttgttaacggtgtcataaatccagccgttaagttcgtcaatttttgtttgcagggctggagggtagtaatcacccgctttcgcgcccagcgcatcaaacgcggtattgaacatgcggatgatttctgctgattcgttgctgacgatggtgtggttctttttgtcccacagcacgggaacagtaactcgtccgctgtagtgtggatcggcgtggagataaagctgatacagaaattcattttgatagagcgtgtctccggttgctcccggaaaactgtcatcaaaggcccaaccgttttccagcatcagcgggttcactacggaaacggaaataaacggttccagtcctttgagtttgcgcatgatcagcgtgcggtgcgcccacgggcaggcgagtgaaacatagagatgataacgatctttctctgcgataaaaccgcctgtgccagtggggccaggagcgccatcggcagtgagccagttacgaaatgcggaagctgaacgttgaaatttaccgccggtagatttggtatcgtaccaggtgtcatgccagacgccgtcaatcagttgacccatttttctctcctccaatagcaaaaacgaggagcttcctcctcgttttttatcgttaagtatagcgcgtgcttaccactttttattcagcaggcggtcgatgctatacgcgcccggaccggtaattgccagcagcaggaatccgccagaaattgtcaggtttttcatgaacatcagcgagttgacgccttcagcaaagttgctgtgaaataaaaatgccgtcagcagcgtaaagcccgcagtaaacagggctgtggtgcgagtcaggaaaccgaacaggattgccagaccaccaccaaactcaagcagaatcaccagcggcagcataaaacccgggacgcccattgcttccatatattgttgggtacccgcgtagccagtaatttttccccagccagcggtaataaacagaatcggcattaaaatgcgcgctaccagtacaccaacatcttctaattttttcatcatactctccactgcgccactcaggctgctgattgtttttttgtgcaatggcgcggtattagcgtcgttgctgtcgatggagagaatcataaacgtggtgaatgatgattgatagcaaggaaaactgtcaaaaatcttcaaaaaatttgagggataaggccggaatggctccggccagagggaagttaaccgcgaagctgttgctgcttgagggtcgttttaaccagacgccaggcgctccatacgccaaaaccgcgtctggcccagcggaccagcatattaggatggcgaatcgtccagatcgccatcacgctactgccaaccagcgcccaggagcgcagacttagcagcatattccagcgacgatcgtaagcgcctgttgtctccagccattcacgacgactggcggaaagatccagccgttgttgctggatctggctaagcagttgcgccttacgtcgttcacgttcgactttactgctcacgggactcctcctcgagcagctgccgatcgtttgctaactcatggcgtgtatggcgcagcaacgtagacttacgcgatttacgtagcgtccagataccgccaatcagtgccagtagcagcaacaccacggtggtggcaatcatcgcattcaggcgatattgcgggtcaaccgcccaaataattagcaccatcaggctcataagaccaaatgcagcgaaaagcatcgtcaggcccagcatcagtaaaagttgaaagagattcgctttttcctcttccagctccaccaccgccagccgcagacgtgtctctaccatttcaaccatgatagaaacaattcgctgcccgatgcccagaacacttttaccgggcccttgtgcgtgatgagtgtccgccataattaacgacgcgacagcagaacgccgagcactacaccgattgcagcgccaatgcccacgcccgtccacggattttcgcgcacatactcatcggcacgcgccgccgcgacacgggtttgtttggcaatggcatcaccggtttcacccaggcgataacggctctgtttcagtgcctgctccgctttgctacgaatcttactcaactcttctttcgacttctcgccagatgagctaagcacctcttccagcgtatcggaaagggatttcaactcagcacgcagatgttccgtagtgtgttctttcgacatagttttctccaggtgagtaagtagtgactattgtgagttagtagtcgcgcgcttccagctttttcagctcttcctgcgcttctgccagtttccgttcgcgtttggcaatcttatcggcatcgcctttttgcttcgcctcggctaaatcttgctggcgttccgccacctcatctttctgctttgcgattttcttctgatgatcggcacgcagctggctatctgaacagttggcccggacttcactcagggctttattcagaccgtcaatacgattctggttttggtgtttttcggcatagctgatctccttaaggatattttgctccttttcctgacacagggtagtggcataactaccggcactaagagcaaagagagaaacagctaaagcgatgcggtatttcattcttgaaccttccattgtgattcggacctattacaaaggaacgattgtccagacaacgaagcggtagtgttaaccaccgcctcattaatcatagacagttacggtgaaatcaccaaagtgagtgatatgtttcggataacaggaagttatccgaagcgatgagagttatcccgtaaccgggtcagccactgcatagcctgactgttattgtcctgctgcgcaatgatgtagccatggggcaatgttctgtcgaggaccgcttttgcggcggcgctctggtcgctggagtcaaatgtaattaacagagtgtcgtttttgggggtgatacttttgaaaggaatgccatgagcgtcaaggtgatgccagattgaaaaaccgtctggcatcgttgtgccttgatgaacggcacgaatcgccagcgtagactcttgctggcgaaccgcggaccaggccagcaacagcatgccgaccagaagtaaaacagcgccggaccaggctagctggcgaagcgacatgcgaggtatttgcatcccttacccccgatttccatatttctttttccataacacgaccagagaacctgccaggccaaacaccagcagcaccaccgggagcagcatcaggcatgacatcagctggtcctcgtactttaaaaataccggcgttttgccgagcatgtaacccagagttgtcaggatcaatacccacagcagaccgctcatccagttgaaaaactgaaagcgcgcgttattcagccctgataacccggcaatcgtcggcagcagtgttctgacaaacgcaataaagcgaccaattaacagcgccgataaaccgtgtttatgaaaaagatggtgtgcgcgttgatgataatgcgcgggtaaatgagatagccagttttgtacggtgcgggtattgcccagccatcgcccctgaatatagctgacccagcagccgaggctggcggcaacggtcagcagtagaatcgtttgcggatagcccatcgcgcctttcgcaatcaacacgccgaccaataccagtaaactgtcgcccggtaaaaaggccgccggaagcaagccgttttcaaggaacaaaattacaaacaagacaaaatacaacatgccaatcatcgatggattggccagggtttcaaaatcctgcgcccacagggcttgcagcaattgggtcaaaagttccattcattattcctggtgaatcggttaacgccacgctggttttaaaagatgcactaccgcaatgttattgctgttttggtatgttctgcgggtttgatacatcaacacagcctgaactattccctgttaaatcgtgagataagaaagcattcaaaaacataaattcaaattgaatctaattgtaacaaaggtcaacgttgttcgttatcaaaattacatgtccgtggagtctgattttgctgaatgcaggggagggtggcgagaggatttacacaggctgacactttatacttttcgcttaccgacgagacaaacaggcgcattgcagcgcctgtcggacaggaatttcatttactgccgctggtggctgtatcgagatgcaccaccgggttttcggcgaatagatagcggtcggcattgaactcgaagtcgtcgctggtttcgttaaataacatgatcttggtgttttccagatgctgccacattgccagcttagcagcatgaggatctttgcgaatcagcgccttgaggatttgatcgtggtcatcacaccagttatcgacggtacgggaatcaatgtgttcgtgcagttttttccagtacgggttatgactacgctgggtccacattttttccacgatagccgccagggcggagttctgcgtcgccagagcgacctgaatgtggaactgcaaatcccactcggaatcacggaagcattgttcgccgcgcgcctgttcctgaatggccatcagtttcatgatgtcctgtttcgttacctgagttgccgcgaattcggcaatattactttcgatgagctggcgagcctgaagcaactcaaacggaccgtaattggcgaattccatattattgtcagccgcctgctgatggcgcggctggttggaaaccacatgaatacctgaacctttacgcacttcgacatagccttcaacttccagcatgatgatggcttcacgaactaccgtacggctgacgttcttttcatcggcaataaagcgttctgcaggcagtttatcacccaccagatagacgccctgttcgatgcgctctttcaggtcagcggcaagttgttgatacaaacggcgtggttcagtgatttccatatgcgctccaggcatgatacggcagactatatttgttataccacttttgcgagtttagctctactcgcagtgatgaaaaagccgcctgagaaggcggctttgaagggaaactaaaacttacacgaaacgttaatgttgcggtgcgggatcgttatgtgtttcctgcgccacctcaatcgccggtttgttctgcaacacggtccagataaccagcgcacctaacaggtcgaacactgccagaactgcgaacagcgggctgaagccgatggtgtcagccagtgcaccgacaaccagcgcaaacagcgtacttgccagccatgcggacatcccggttaaaccgtttgccgttgccacttcgttacgaccaaacacatcggaagagagcgtaatcagcgcgccagacagtgcctggtgggcaaaaccaccgatacacagcagcataattgcgacatacgggttggtgaacaggccgatcatacccgggccaatcatcagcactgcacccagcgttacgaccatcttacgggaaacgatcaggttcacaccaaaccaacgctggaacagcggcggcaggtaaccaccgaggatacaaccgaggtcagcaaacagcatcggcatccaggcgaacatcgcgatctctttcaggttaaagccgtaaactttaaacatgaacagcgggatccacgcgttaaaagtaccccaggccggttctgccaggaaacgcggcagcgcgataccccagaactgacggttacgcaggatctgaccaacggacattttcttcgccgtgctcacctggtgctgggcttcctgaccattaataatatagtcgcgttcttcatcggtcagatgcttctggtcgcgcggatgtttatagaaaatcagccatgccatcgcccagataaagctcaatgcaccggagatgataaatgccatctgccagctgtgcattacgattgcccataccaccagcggcggcgcaatcatcgcaccaatcgaagaacctacgttaaagtagcctactgcgatggaacgctctttcgccgggaaccattcggagctggctttcagacccgccgggatcatcgctgcttccgcggcaccgaccgcaccacgagcaacagccaggccaccccagctacctgccagcgcggttgcaccacagaacacggcccacagcacagcaaacattgcataaccgattttcgtacccagcacatccagtacataacctgctaccggttgcatgaccgtataagcagcagaataggctgcgatgatataggaatactgttgggtggagatgtttaactcttccatcagagttggcgcagctgccgccacagtgttacgcgtcaggtaaccaagcacggtgccgagcgtcaccagtgcgatcatataccaacgtaaccctttaattttacgcatgtaaaacctcatcgttttgttatatccgcaggaagcgcggccatcatcccgccagaggctgaagatgttagttacgaccgggtaaccgaaaaaaaaccggcacgccccgaacgttgccatgaaagtttcgtgctaattcggcttccgtaccggttaacccgattcatctaacaaatgaatgaatcggcaatttgcattccgtcgacttatgatttgcgacggcagaaagataacttgtcatacaactttaaaaggtgagagccatcacaaatgtgggaatatttgtagggacattacctgacgacagcaaggccagtactggcgcggcctgcagcgagatttaccactttgagagtaatttttttaactacgtttattgatctaactcacgaaaatatcttcggactctggaaattggtgtgataactttgtcagcatcgcaccataagcaagctagctcactcgttgagaggaagacgaaaatgactccgtttatgactgaagatttcctgttagataccgaatttgcccgccgtctgtatcacgactacgcaaaagaccagccgattatcgattaccattgccatttgccgccgcagcagattgcggaagactatcgttttaaaaacctgtatgacatctggctgaaaggcgatcactacaaatggcgcgctatgcgtgccaacggtgtggccgagcgtctgtgtaccggtgatgcgtctgaccgtgaaaaatttgacgcctgggcggcgactgttccgcacactatcggcaacccgttataccactggacgcacctcgaactgcgccgtccgtttggtatcactggcaaattgctttctccgtcaactgccgatgaaatctggaacgaatgtaacgaactgctggcgcaggataacttctccgcgcgcggcatcatgcagcagatgaacgtgaaaatggtcggcaccaccgatgacccgatcgattctctggagcatcacgcagagatcgccaaagacggctctttcaccatcaaagtgctgccgagctggcgtccggacaaagccttcaacatcgaacaggcgacctttaacgactacatggcgaagctgggcgaagtttccgataccgacattcgccgctttgctgacctgcaaactgccttgaccaaacgtctggatcacttcgccgctcacggctgtaaagtgtctgaccacgcgctggatgtggtgatgtttgctgaagcgaacgaagcggaactggacagcattctggcgcgccgtctggctggcgaaaccctgagcgagcacgaagtggcgcagttcaaaactgcggtactggtgttccttggtgccgaatatgcacgtcgcggctgggtacagcagtaccacattggcgcgctgcgtaataacaacctgcgtcagttcaaactgctggggccggatgtaggctttgactccatcaacgaccgtccgatggcggaagagctgtctaagttgctgagcaagcagaatgaagaaaacctgctgccgaaaaccattctgtactgcctgaacccgcgcgataacgaagtgctgggcaccatgatcggtaacttccagggcgaaggtatgccgggcaaaatgcagttcggttccggctggtggtttaacgatcagaaagacggtatggaacgtcagatgacccaactggcgcagctcggtctgctgagccgctttgtcggtatgctgactgacagccgtagcttcctgtcatacacccgtcacgaatacttccgccgcattctgtgccagatgatcggtcgctgggtggaagcgggcgaagcaccggcggacatcaacctgctgggcgagatggtgaaaaatatttgctttaacaatgcgcgtgactacttcgccattgaactgaactaaggtctggggttgatatgcaatacatcaagatccatgcgctggataacgtcgcggtcgctttagcagatttggctgaaggcacagaagtcagtgtcgataaccagactgttacgctgcgccaggatgttgctcgtggacataaatttgcgttaacggatatcgcaaaaggggccaatgtcatcaaatatggcctgccgattggttatgcattggcggatattgcggcaggtgttcacgttcacgcccacaatacgcgcacgaatctgagcgatctggatcagtatcgctatcaacctgattttcaggatctgcctgcgcaagcggcagatcgtgaagtgcagatctatcgtcgcgctaacggcgatgtcggggtgcgtaatgagctgtggatcctgccaaccgtgggctgtgtcaacggcatcgcgcggcagatccagaaccgttttctgaaagagaccaacaacgccgaaggtactgacggcgtgttcctcttcagccacacctacggctgctcacagctgggcgacgatcacattaatacccgcaccatgctgcaaaacatggtgcgccacccgaacgcaggcgcagtgctggtgattggtctgggctgtgaaaacaaccaggttgccgcattccgtgaaacgctgggcgatatcgatcctgaacgcgttcatttcatgatctgccaacagcaggatgatgagatcgaagccggaatcgagcatttgcatcagctgtataacgtgatgcgcaacgataaacgcgagccaggcaaactcagcgaactgaagtttggtctggagtgcggtggttctgacggtctttctggtattactgctaacccgatgctggggcgtttctctgactacgtgattgctaacggcggtactaccgtactgaccgaagtgccggagatgtttggcgcagagcagttgctgatggaccattgccgcgacgaagcaacgtttgaaaaactggtcaccatggtcaacgacttcaaacagtactttattgcccatgatcagccgatctatgaaaacccatcgccggggaacaaagcgggcggtatcaccacgctggaagacaaatcacttggctgtacccagaaagcgggttccagcgtcgtggttgacgtgctgcgttacggcgagcgtctgaaaacgccagggctgaacttgttaagtgcgccgggtaacgatgccgtagcgaccagcgccctggcgggtgcgggctgccatatggtgctgttcagtactggtcgtggcacgccgtatggtggatttgtgccgacggtgaaaatcgccaccaacagtgaactggcggcgaagaaaaaacactggatcgactttgacgcgggtcagttgatccacggtaaagcgatgccgcagttgctggaagaatttatcgacaccatcgttgagtttgccaacggtaagcaaacctgtaacgagcgtaacgacttccgcgaactggcgatcttcaaaagcggcgtaacgctataaagtcgaaatgagttgttaataaaaaacggcgtttcataatgtgaagcgccgtttgcttttccatacctgctaaggatttatcatgaccgcgtattggctggcccagggcgtgggtgtcatcgcctttctgattggtatcacaacatttttcaatcgtgacgaacgtcgcttcaaaaagcagctttcggtctatagcgccgttattggcgtacatttttttcttctgggcacctatcccgctggtgccagtgccatccttaatgccattcgtacattgattaccttacgcacgcgcagcttatgggtaatggcgatttttattgtgctgactggcggaattggcctcgcgaagttccatcatcctgtcgaactattgccggttatcggcacgattgtcagtacctgggcgctattccgctgtaaagggctgaccatgcgctgcgtaatgtggttttcaacgtgttgctgggtgattcacaacttctgggcggggtcgataggcggcacgatgattgagggtagttttctgcttatgaatggcctgaatatcattcgtttctggcggatgcagaaaaggggaattgatccgtttaaagttgagaaaaccccttccgccgtagacgaaaggggttaaacaattaattacgcagggcgctatttgccagacgatcgtcttctgcctggcaagctgccgcagtgaacagcacgtcagttgaagagttcagcgcggtttcgcaagagtcctgcaatacgccgatgataaagccgacggcaaccacctgcatggcgatatcgttcgaaataccgaacatattacaggccagtgggatcagcagcagagacccccccgccacgccggatgcgccacaggcacacagagaagccaccacgctcaacagcagcgccgtgggcagatcgaccggaatacccagcgtattaaccgcagccagcgtcaacacggtaatagtgattgctgcgcccgccatattgatggtggctcccagcggaatagaaacggaataggtatcgcgatccagattcagcttttcacacagcgccatattcaccggaatgttcgctgcagagctgcgggtgaagaaggcatacacaccgctttcgcgcaggcacagcagcaccagcgggaacgggttacgacgaattttccaccacaccagcaatgggttaaccaccagcgccaccagtaacatacagccaaccagcacgaccagcagttgcgcgtagccccacagtgtggagaaaccggtggttgccagggtagaagaaaccagcccaaaaataccaatcggtgcgaagcgaatgaccagtttcaccataaaggtaacggcattcgacatatcgttaaccaggtttttggtggtctcgttaccgtgacgcagtgcgaagccgaggccgatcgcccacaccagaatcccgatgtagttacctttcagcagcgcgtcgatggggttggaaaccatgctcattaccagcccgcgcatcacttcgacaatgcctgacggcggcgaaatatcacccgcgctactggataaatgcagggtagaagggaaggcaaagctgaagactactgcggccagagcagcagagaaggtgcccagtagatagaggaacaaaatagggcggatattggttttctgcccgtgctggtggttagcaatagatgccatcaccagcatcaacactaggatgggggcaacggctttcagtgcgccgacgaacaaagtacctaacagaccaacagcttccgccgcgggttttgagatccatgccagaagaatccccagaacaaggccgaccaggatttgttttaccaggctgccatgagccagacgccggaatagccccggtgaacgttgcgtagtcatttttcgatcctttcattgtgttgtcgcacatccctggtgcgttctgtcgacgcatctttcaggatgtaacaaagtgtttgcaaggtcgagtataaggaaagttacagcttcgggaagcgaaaaatgctggattttaaagagaggtcatattttgaaacttaatggttacatttatttgacataaaaataaagccaacgtgcggcttccagactgatgacaacatcaaaaaaggactcggtcagtcccctcgccccgtttggggagagggttagggtgaggggaacaggccagcatcggtgcgaaaaattaccctcaccccgaccctctccctggaagggagagggagaaaacggtgctcatgttaatgacagggtacacggcttaggcagattaaaaattatccaccccgctgcttatcatgccgataattcacccaggcgttgataataaacgtcatcaccagaatgccaaacaccacgcccagcgagacggcgattggaatatggtagaagtcgacaatcagcatcttgataccgataaacaccagaatcaccgccaggccatatttgagcatcgagaaacgctctgctacgcccgccagcaggaaatacatcgcacgcaggccgaggatcgcaaacaggtttgaggtcagcacaatgaacgggtcagtggtcacggcgaagatagccggaatgctatccacggcgaaaatcacgtcgctcaattccaccagaatcagtaccagcatcagcggtgtggcgtacagcaatccattcttacgcacaaagaaatgctcgttgtcgatggtgtcggtcatgcgcaaatgaccgcgtagccagcgcaccagcggcttgtcgccaatgcctgattcatcttcatgggcgagcgccatcttcacgccggtaaacagcaggaaggcaccgaagatatacaggatccagtcgaactgcgaaattagccagctgccagtgaagatcatgatggtacgcagaacaatcgccccgagcacgccatacaccagcacgcggcgttgtaatgccgccggaacagagaaatagctgaacaacatcagccagacaaagacgttatcgaccgccagcgatttctcaatcagataacctgtgagaaaggccagtgcctgtggatcggcaacggcgcgaccttcggtttgcaccagataccaccagaaagcggcgttaaacagtaacgacagcgtcacccagaccagcgaccaggccgcagcctgtttcatggtcatggcatgtgccccacgacgcccctgcaacaacaggtcgatagccagcataatggcgacaacaacagcgaatccgccccatagcaacggcgtgccgacagtattcatagaagttccttacacataaaaaaacggccaacgtcggaagacgtcagccgctgctttttatgcatagacctcgccttccggcaaggtctcacttacaacaaaaaaggaatacgtctgcgtattcctttcgggttgcccggtgaccggatgtgttttttcacacatcgtaatgacgatcgaccggcaatgaagttactcccctttgcaggtaacaaagtatgacagaccattcagccagtcaatggtctgttacataccttttacactgttttactttggcaattatagttttacgctatctgccggaaaaatcaccccagtctggcggcggatctcggtcagcagtttggcggtgatgcgactgaccgccagccctggatgatccaccagatgctcatccaccagggtagcgaacagctctgcttcgtagagcatggtattaatatgctgcggctgggtgagatcctgcatttggctgccacgcggcacgaagcacactttctggcattcagacagtttttcaatcaccagcgatcctgcttcgccctgaatctcgctcgccaggacagaatcactgacttttgagtgctgcaaggtgacgctgaaatcaccgtaatccatcaccaccacgccctgggcgtcaacgccgcttgccagcaaactggcggttgcctgcacgcttttcggctcaccaaataacgccaccgccgacgccagacagtaaaaaccgatatccataattgaaccgttagagaatgccggattaaaggtgttgggattctcaccatccaggtaacgttgataccgcgaggaatactggcaatagttgaaaaagactttccgcagtttgccgactttcggcagcgcctggcgcaacaaatgaaagttcggcaggcaggcggttttaaatgcctcaaacagcaccacctgattttcccgcgcacaggcaatggcggcatccacttccgccagattcgacgccagcggtttctcgcaaatcacattaattttatggctaaggaaaagttgtgtctgggaaaaatgcagggaattcgggctggcaatatacaccgcgtcaatggcatcgctttccgccatcgcttccagcgaggtaaacagatgctcgacagaaaaatcattggcgaagtgctgggcctgttcaaggctgcgggaatatacggcggttaacttgtatttaccgctctcatgggcggcctcgacgaactggcgagtgatccagttcgtaccaatcacagcgaaacgtatcataacgcgtggatactccataaagggattctgtcgtcaatgtagcacgcctttttcatcttcgacgtgcgcagatacgcattatttctgcgccggacagccatgctcactaaacggcccaatcatgaccgaaggcccgagatatttcggctggcgatggaggattttggcgtcaatcacggcgctgacacgagcgagtttctcccgcagttgagtataaaaaccgtgcttcatattgaggtctggcgcgttaaaaccgatagcgtcgatgccgtactgttttgccagccagatggcgcgttgattatgaaattcttgcgagataatggtgatatggttttcaccaaaaacctttttggcacgcactaccgaatccagcgttgagaatccggcatagtcgcagaagatcacttttgctggtacgcctttagcgatcaaagcctgctgcatacctgatgcttcatcgtaatttttacgtccgttatcgccacttaccagcagccatttcacttttccggcgtggtacaacgctgctgcggtatcaatacgtcgggtaaagtagcgattacccggcctcgcccccagcaataaacccacgttacgcgccggaacggcgttgacatcgctccaggtcagctgtttgctggcgttgaccattacgcgatcggcgataaggatggtcgctcctgccacaagtaacagtaagcaggcaatctttagagtccggcgagaaaaacaaatacggagaagaaggcgggcaaatgcgcgcagcatggtcgttatccttaacgaaaggggggaggtcgattttaggcgctaaagaaagaaaagataacgcctgacatcattttcagattttgttctgcccaagcgacaactgcgttagccacagtcgggtgtcgaactcaagctggtggtactggggttccatatgacaacacaactggtaaaacgctttgttatgctctttctccttcaggtgcgccagctcgtgcaccacgatcatgcgcaaaaacggttccggcgcgttgcgaaacacggtagcgacgcggatctccacctttgctttcagcttgccgccctgcacacgagaaacagcggtatgtaacccgagcgcgttttttagcacatggatcttattgtcatacatcactttattgatcggcggggcattacgcagaaactgatttttcagatcctgagtatattgccagagggctttatcggtggcgtagtcgtgtgttcccggatagcgttttgccagcacatcgcccagacgctgttcgttaatcagtgttcgcacctgggaaagtagctgctcgggataaccctgaagataagtaagattgctcataaccgcccacgaaaaagagaaaaagggtatactcacgcacccttttcaggggcaatgtcgaaattttatcattcaggagggccgatgagccacttagacaacggtttccgttcactgacactacaacgttttccggcgacggatgacgttaacccgctacaggcgtgggaagcggcggatgaatatttgctgcaacagttggacgacacagaaatccgcggcccggtgttgatcctgaatgatgcctttggtgcgttaagctgcgcactggcggaacataagccgtacagcattggcgactcatacatcagtgaactggcgacgcgcgagaatttacgcctcaacgggattgatgagtcgagcgtgaagtttctcgacagcaccgccgactacccgcaacagccgggtgtggtgctgatcaaagtgccgaaaacactggcattgctggaacagcaactgcgtgcgctgcgcaaagtggtcacgtcggatacacgtattattgccggtgccaaggcccgtgacattcacacttccacgctggaactgttcgaaaaagtgctcggcccaaccaccaccacgctggcatggaaaaaagcgcgcctgattaattgcactttcaatgaaccgcagctggccgatgcgccgcagaccgttagctggaagctggaaggtactgactggactatccacaaccatgcgaatgtcttctcccgcaccgggcttgatatcggcgcgcgcttctttatgcaacatctgccagagaatctcgaaggggagattgtcgatctcggttgcggtaatggcgttattggtctgacgctgcttgataaaaacccgcaggcgaaagtggtgtttgtcgatgaatcgccgatggcggttgcttccagccgtttgaacgttgaaaccaacatgccagaggcgttggatcgctgcgagtttatgatcaacaacgcgctctccggcgtggagcctttccgctttaatgctgtgctctgcaacccgccgtttcaccaacaacatgcgctgaccgataacgtcgcctgggagatgttccaccacgcccgccgctgcctgaaaatcaacggcgagctgtatatcgttgccaaccgtcacctggattacttccataaactgaagaagattttcggcaactgcaccactattgcgacgaataataaatttgtggtactgaaagcggtgaagctgggacgtcgtcggtaagattgggagttacctgccggatgcggcgtaaacgccttatccggcctacgttcagcacgttactccaggccggataagacgcggcaagcgtcgcatccggcaatgtctgcccagttctggaatcgcgcttccataaaacaaaaaatccctgtcaccatcgtctacattctcttgtttagcgtttttctacgtttattcttccgtcacacagataaattcatccgttgccaatctggcaacggatgttatcatattgccaatttgtcaacggacgtgatgaagaatgcacctgataactcaaaaagcattgaaagatgctgcggaaaaatacccgcaacataaaacggagttggtggctctggggaacacgattgctaagggatatttcaaaaaacctgagtcattaaaagcagtattcccatctctggataacttcaaatatctggataagcattatgttttcaatgttgggggcaatgaattacgtgttgtagcaatggtcttttttgaatcgcaaaagtgctacatacgtgaagttatgacgcataaagaatacgatttctttaccgctgttcatcgtactaaggggaaaaaatgattgcgattgccgacatcttgcaagcaggagaaaagctaactgctgtggcaccttttctggcgggtattcagaacgaggaacaatacacccaggcgctggaactggtagatcatctgctgctcaacgatcctgaaaaccccttgctggatctggtgtgtgccaaaataaccgcgtgggaagaatcagcgcccgaatttgcggaatttaatgccatggctcaagccatgcctggcggtatagccgtgattcgtacccttatggatcaatatggtttaaccctttccgatctgccggaaattggcagtaaatctatggtgtcacgcgttttgagcgggaagaggaaattaacgctggaacacgctaaaaaattggcaacgcgattcggcatttctcccgccttgtttattgattaacgcgacgtgccggatgcgttgcatccggcgcttcaaataacgatttaaatctccagcgccagccgtgttccctgggcaattgcccgtcgtgcgtccagctccatagccacatcgcagccgccaattaaatgcaccgttttcccgctatcaatcagcggttgcgccagcgcgcggtttggctcttgccctgcgcagatcaccacattgtccactgctaatacctgcgtttcgccgttgatcaccacatgcagcccgtcatcgtcaatcttctgataacttacgcctgggatcattttcacaccccgcgagagcagggtggtgcgatggatccagccggtggttttgcctaacccctgtcctggtttgctggctttgcgctggagcatcacaatctgccgtgggctacgggggatctgcattccctgcgggcttaagccaccagcctgttgtaggctactgtcgatcccccattcattacagaacccggcgatattctggctggtggattcgcccggctgacttaaatacatcgccgtatcaaaaccaatcccgccacaaccgatgatggcaactttgttgccaaccggcgctttgtcgcgcagtacatcgagataactcaataccttcggatgatcgatcccgtcgatgggcggagtgcgcggcacgatcccactggcgaggatcgtttcatcgaaagcctgtaactgatccgccgtcacggtgtgattgagttttagcgtcacgcccgtcacttcgatcatccggcggtaatagcgcagcgtttcgtaaaactcctctttgccggggatctgtttggcgatattaaactgcccgccaatctcgctatgagcgtcaaacaatgttacctgatgcccacgcgccgccgcgttaatggcaaacgccagcccagcaggtcccgcaccgaccaccgccagattttttttctgcacggcgggaaggattggcattttggtttcgtggcaggcgcgaggattcaccaggcacgaggtgactttgccaacgaagatttgatcgagacaggcctgattgcagccaatacaagtgttgatctcatcggctcgtcccgattgcgcttttgacagcagctccgcatcagcaagaaacggtcgcgccatcgataccatatcggcatcgccgcgcgagagaatatcgtcggcaacctgcggatcgttaatccggttggtggttaccagcggcagcgagacgtggcctttcagtttgcgcgtgacccagctaaatgcgccgcgcggcacgggcgtggcaatggtcggaatacgtgcttcatgccagccaatgccggtgttgataatggtcgcgcccgccgcttcaatggcctgcgccagctctaccgtttcggcaaaagtcccgccgtcttcgaccaggtcgagcatcgacagtcggtagataataatgaagtcgttgccgacgcgttcgcgcaccgcacgcactacttctacggcaaatcgcatccggttgcggtaatcgccgccccactggtcactacgctgattggtgcgcagcgtcagaaattcgttgatcaaatacccttcggaacccatcacctctacaccgtcgtatcctgcctcccgcgccagttgcgcgcagcgggcgaaattgtcgatcagttgcaggatctcttcatggcttaactcatggggcacgaaacggttgatgggggcctgcaatgcggacggggcgaccagatgcggttggtagctgtagcgcccggtatgcaaaatttgcagggctattttgccgccttcctgatgtaccgcttcggtaatggtgcgatggtgtgggatctggctggcgtcgttgagcattgcgccaccttccatgccaacgcctgttaaatctggtgcaatgccgccgctgacaatcagcgccacgccgtgacgggcgcgttcggcataaaacgctgccagccgctcggcaccgtccgggtattcctccagcccggtgtgcattgagcccatcaacacgcggttttttaacgtggtaaaacctaaatccagcggggcgaacagcgacgggtagctcataaaattgtccagtatgtaaaataattgttatgtggtcggatgagttctaatttagccgtcgccggagaaaagggaaaaggggagtgcggggtttgtgatgggattcaaaaagaatacgcccggtgataacgccggatgcgacgcttgtcgcgttttatccaggttacggaattgcacatgtagggcggataaggcgtccacgccgcatccgccagtggcgcggtgcagatgccggatgcgacgcttgtcgcgtcttatccgacctacgggaacgcacatgtagggcggataaggcgttcacgccgcatccgccagtggcgcggtgcagttgccggatgcaacgcttgccgcgttttatccggccaggaggattgcacatgtagggcggataaggcgtttacgccgcatccgccagcagttgcaaattattgcttacggaaaaaatcgttatacaacatatacaaatgcgcggcactccaggagaaatttggtgcgccttgctgtgcgcctgtcagcgggttgtaattttcctgaattggtccatcggcggttaaccctttggcgtgccggaagaacgtatccgccagcttcagggcatcatcacgataaccgtaacgctccatccctttcagaccaaaccagaactgatccacccatacgcgcccacgccagtagatatcagcgccaaaagccggattggttaacgccgccgttcccagcgggacaaaggtgttgaactctttaggatcgagcatcaccttcaccaccgcgtcggcattggcctgcgttgccgcaccgttaaacagcggcgaccagccttccggccctttaccgcgctcaacaatcggtttgcccgcgcagccgttcgccagtggtttatcttcaatacgtacgtcatagtagaactgggtagtcgggtcgaacatacaggtgttgatgtagtccgcgagctgctgtgccaactggcgatagcgtttggcctcttctggcttaccgaggatggttgccatctccgccagataatggttatcgctgtacatatagctggcctgatccaccgactcctgcaatagcgagtagcccagcaacgttccgtcctgactgcggttttcggcgaatttcaccgtccagtcgctacgtttgccgccattagcgacatatttatccaactgttctttgtcgataaacccaaagacggcggcatcatcacgccccgattcccacgatgcagcaacctgtgccggaatttccagactgtcgtactggcctttctccaccacgcgggcgtagttgttcagcccagactgcgtctcttctttatcgccttttttcaccgtaaacagcatctcgccgctctcagtgttgtgggctttgtcgcgggtcgcgccatattccggcacgccgttgccgttgtgatcgcggttacgtaaccaccagtcgtgataggccaccagtttcgggtacatctctgccacccaggttttatcttgggtgacgttatacacttccatcaccgaccaggcggcaaggctgggtttggtattacgttcgttccagttgccgccatcgccaccacgctcggggctaaggttccacgctatcaggtcggggacaaagcccacatcctgcggacgcacgctatcgccaggctggatctgccaggagaagaccgcgcggatattctctttggcgatgtccggattgaaatgcgccatcgcaaacgcctgcttccaggtatcccacggccaggtctgattgccggagaaccagcgcccggtcaccgacggtgtaacggtgttaaatttcaccgcaccgcccggtgagcgccagttaccgttgagcgtttcgatcgctttcaccgcgacgcgcgtctgttccggcgtcgcatccggattggttaaccctttcttcaggtattcttcccagcgttgctgcgaggcggtgagataaaacgccggacgcgccagaatatcgcggatctgcatttgctctttgctaacttcctgagcggtcagcagatgggaataggtggtgtagagcgtggtcgaaccgttgatatgcgccttactggtaaagcgattaccgttgatttcagtctgcaccggcagggatttatgcacctgatattccgattcgccggaggtcagcagatcccaggtggcgcgcactttgccaaaggtgactttcaggccatcacgggtggcgctgattttgcgctgatagtcagggtattcgccagcaatggttttatcggaaagcggtttcccttctttcgcttccagtttttccagcagttcgccgtcccacaccagatccagcggtttattgctggtgattttggtttccagtagtgacgtgcgcggcgtggcgaagcgcagagtcatttcgacttgcacatcttttgctgtcagtttttgcaccagcgcaccgggaatactgtatgcctccagcgtaaagtcgactttcttgccgtcctgccagacggtcaggcggtcgaaattgctggccataaagttgatgtactcttccgtcagcagcgcaacgcccggaaagccgcccatggtgttagggccgtctggcaacagatgaccatgccaggctccgagatcgaaaaacggattaaaacgctggtgatcgtcgtaatcgtaatccttcatgtactgcggcgcgccagtacggttaatcacgtttttataattgtcggcgttagcggcatgggcggaaaaacttatcagcagagcgcaggttactggcgttaaaatagtttttattttcatgaaattacagtccttattaccagtagaaatattgcatcaggaagatttggtcgctgggatcgtgagaggcatttttcatgtagaagcggctatcaaaagccgtggcgaaacgtccgccgccgtattcgtaccagataccaaactgcatgaaagaggtggtttcatcgtcagcgtggtcagggcgatgtttggcgtaggtgtaagcggtggagagataaacgccctttaacgcttcatacatggcgctcaccatcatcccactttcacttcccggtacgtccagcccgtcggcgcgtccggtatggtgccaggcgcgagcggcaaagttaggagttagcaggcccgtgagatagagctgtcctgtgccgtcggtgatttccagaccgttcatccaggtgatgccttcggcaaggtcatactggatgtaaccgttcatcattgccggataggtgtatttgtcgtcatagcgatcgtatttgccaaaatgtagccaggctttgctttcatcatgatgtccggcaggagtcgcggtgacgctataacgaaagttgccgcttaagttctgtaccttcagcgcagtcataatgtcgcgggtattgggaatgacgtagcccagatcgggggtgaaatcgccccaccattgcaggtcatccagcgaggaatcctgacgcagactgagcatgatttcggtgccatcattggtacgataaccgccatagaaacggttaattccgccctcgaaaccaccccagctatggtctggcacccaggcattgccgtcgtggtcggcctgcacggtccagccttcgccgtaaatcaggccgaaccaggagccgtacttcatctccaggccaccttcaatataggtaccgtcgctgtatttatgtttattctcaccctctaaatccatatatccaccaacccctaattcgccgtaaaaacgaaatgaaggagaagatgtcgaggtaattgcgggtgtttttgtgtcgtcatgttctgccggacgtgcttcttctcctgccgcagaaaaggcgtagcaaaacggcagagcaagtaatgctctgcatggtgcagtgattaatttcattgtgttaatccatgagctaaagaaaaagtacagccttttatcgttgtaattataaaaatataaaggcagaaactattttccctctcctcatccaggaagagggaaaatgcctgctcattttttattattctgcttaatcaacattgctggctggcgtcgcttcaatatggcgctcttcagccgttaatccctttatatatttactgtatttccaccacgcaaagccaaggaagataacaataccgccgacgttataaaaaatgatggtcagaatattcgcgccagtcgggaatgtcgaagcgacaaaccctacggcaaatatcgcaatcagcattgaaacaacgataataccggtgcggcgggagcccatacggaaatcgcgtggcaggtgatctaatttggcgcgtaaattcaggtaagccagcatgatgaataacggcggaagcatggacgctgcggcggtcatattaataatagtattcatcagatcctgcacggtattggaaccgagcatcgggataatcatcagcgggatgacgatcaggaactggatccacgctgcgcgcgccggaacgccgttttcgttcagttcgacggttttcttaccaaagatgccttccgggatttcggagaagaaaattttcaccggcgttgcggtccacatcagcagggaaccgaacatcgcggtaaaggacaccagaccgacaaagcgattcatcaacgcttccggtagaccaaaatacgccgccatgccgtggaatacctgcaccgatccgccggtaaatttcaactctttgctgctgacgaagacgttaatcagcaccgaggagacggaatacagtacgccgataaaaatcccggcgaggatgatcactttaacgaacgatttcgaaccgcctttgacgtcgttaacgtacacagcgacggactccgcgccacctgcggccataaagatccaggtggtaacgccgaggaacgcccagttgaagttcgggatcatcgcgtcaacggtgatggcgtcagcaggctgtacgccgccaaccagcgccgtacctgccagtaaaatgtaggagagcgttaacagcagcatcagcgttgaagtgacggaggtaattggccccaacattttcgccccgttggtggaaacccaggtggagaaggcgaacagcaccatactgataatggtggtggcaaccggcgtcataatatattcgtatccgaggaaggcatacgaagcataagcaataacgcgcggcaacagtgaggtgaaaaagaacaggtttacgaaccagtaggtataggcagtaataaatgcccaacgtccgcccagcgaactttttacccacgcgtagacaccggcttctgagtttttatttaacgaaacaaattctgcgatgatcagacagaagggaataaaataaaaaatcgtcgcgaggaaaaacatcggtgccgaggccagtccaagctcaatattattattgataacgttgttaaagctgtaaacggcggcaaaagtcagcgagagcaagccgaatttgccgattgtattacgtttggtatcagacataacacatctccgaaaatgagtagggtagcggtggcggcaaactccttttgccgccgtagttgttatttgttatggaaataaccatcttcgatggtgactttgagaaccacttttttgaccgcgttattgcagataaaccgatacgcttcatggatatcgcaaataacgatttgcccttcgtggacctcaacggtttctccgcagccttttaaatattcacggtcagtttcatcacgataatattccactacctgtaatgtctctttcggcgcatattcaattttttgctgcccttgcaggtagtaatgcacttcaaaatagcgtcgatgcccggtaaatagcgcatcggtcgcggagtctgtctccacgcggtaagtcaatgagtcaccgatggagtgggcgacgccaggctgaatgttgtcgatattttcaatcgcttcaacgcagcgttgccacttcttgccagaggcgtaaatctggcggaactgttctaagttatcgatgatcctcattgcttattctcgctgtgcaaattcgtggaaaagaaccctgcgccgaactcatacgacgccaggctttgcgcggtagcttctccgccagaaaccggcagcaacgtaaagccgtagctgaagtcacggaaccagacgcgccaggagtccagcacctcgctgccccaggagttggagccgaggccaagcagctggtgatcgaggttcagggtgatgtcatcactgcgctgcagctcgttacagtgctgggcagcgtggatgttttcctgggtatagtgccaggcgctgaagttaattgggcgctgcggaaccaccagcagaccgttaccgtggcggttagtcagtgccgtccagcggacatgctgacggttaccgttgttctgcgggaagggatagttctcgaacatggcatcgacggtgctgcgccagatatcgatgatgttagcctgctggctgtcggcgtagttttcgcccggtccacgaccgtaatacgccacctgatcgtattcgccgttaattcccatggtgaaaccgatgcacggaatgatgtgcggatagtcgccgtaacgctcgccggaaagcgccacgttaacctggccatcggcagcgatgcgccagatgtaggtgcagcgcatcccgaagtcaaacaccggcggggcaataactgtgcggctgatgatcagcacttcaccatcgctctgttctacggcaaagtcgcgcagatgttcctgcatgatctgcaaatgattcggttgccacagcccttcgtactcctgcttgtggttgtcgatcatcggcttgaagaagttgatctttggctcgcgagtcagcagcgattcgccattcacctgccaggatgtcggtttgccactcatttttgagaaggtgatcgcgaagttgtagccgcgaacggtgcagctcaaacgatcgtcttccagcgtcagcggacgcgcattatttggtgcgaaaggcactggctgcgcggtgttttccttcagcgggaactgataagtggcgatagggtgtccggcttcgctgtagcgggtgcgggaatctttggtcaccgtaatgttgaggaacgcttcgcgggcgtccagctgcggcagcgtgatctgcaagggggcttcgctgttcggcgcaacgtcgcgcagtttaatctgctgcgtcgcgagcgtttcaccttcggcgcgcacctctgcgtgcagggtgtagtcatcaagcgtggtaaaccacagtttattttcgactttcaactcgccgcgagtcagatcccgcgcgtggatttttaccggcgcgataacctgtttgtactctttcaggcccggtcccggcgtctgatcggaatagatcaaaccatcaagacagaagttatagttgttgggatagtcgccgtagtcgccgccgaatttataccagacattgccgtggtcgtcctgtgcctggatcccgtggtcgcaccactcccagacataatgaccctgaatgcaatcgtgcttatagaagacgttctggtactccgtcagcccgcccggtccgttccccatcgcatgagcatattcacagatgatgcgcggcttcggatgcgggtattcaccaaactcattcatcagcggcacgcgggtgtacatggtggaaataatatcgaccacttcagcatcgcgatcttcttcgtaatgcaccagtcgcgtgtcatccagcgctttcgccgcatggtacatcgcgcggatgttacagccatagccggattcattgcccagcgaccagatgatgatcgacggatggtttttctgcgcgtggatatggcgaacaatgcgctcgacgtagactttttcccactgcggatcgtcggtaatacggctaatatcgccgacattagcaaagccgtgcgattcgacgtcggtttccgccatcacaaacaggccgtagatatcacacagttcgtaaaaacgcggatcgttcgggtagtgagcggtacgcacggagttgatattgtgctgcttcatcaactggagatctttctcgacgcgatccattccaacggcgcggcctttgcgatgatcgttgtcgtgacggttgacgccgtgcagcatcacataacggttattgatccagaacagaccgtcgcgcactttgatatcacggaagccaacgcgttgtggcaccacttccagaacgttgccgttggcgtctttcagcgtcatgaccagatggtaaagataaggggattctgctgaccattgctgcggctgttcgacagtaaaagcaaagctggcgctggtcagtttttcaattgccaaatgatcaatggcgctgctgtgcaccacgcgttcgccatcaaacagggtatattccagcgtcgtgacgacaggggaggcggcgagattttccagcaccacttcgcaggaaagcgtggcatcgcaataggcttcgtcaaagtcggtacgcacagtgaaatcgttaatatgcgttaggtgttttccgaccagataaacatcgcggaagatccccgctgaccaccacatatcctggtcttccacgtaggtagagtccgcccactgcatcacgcgcacacacaacaggttgtcgccggttttaaccatcgcgctgatgtcaaactctgcggtcaggcgactgcccttgctgaaacccacatactgaccgttaacatagacttcaaaataggtttcgacgccgtcaaatttaatcagcgtctgtttaccctgccagccgtcgctgagggtgaaaatacgttgataggcaccggttgggttatcgctggggacaaacggcacatcgatggggaacggaaaaccttcgtcggtatattgcagtttgccgtgaccttccatttgccacatggcggggacggtaatatgcccccagtcagccattaactcagaggtgaaggcttctggtacttgcagcggatggtcaaaaaagtggaaattccactgaccgcttaagggcagaaacaggctgctggtttcgcgggcaaaggtacgcgcttgcgcaacagaatcatatgaaaaaaagtacgcacgcggcgcaagtcggttttcgtgggtgagctgaatgttttcccagcgattcatagggcctcccggtagagagaaatcggaaccattcatggtgatggtagtttgtgtaattgctggggagtttagtaaaatttttactaaaaagtagcaggtaaatgcatttactttaactggatcacgaaaataaacggcagcactgtccggcaaaaacgattgccggacagtgtgtaaggggatttaacgggtcgtgccgcgcagttttaatttgctgggaacgaagactaacagcggcagcgcgcgaccatcgcgggctttttcatacaccaggttaacgccctgacttcccatcatctcggaatggatgcgcacggtggagagcggcggaaaggtaaatcgcgcggtggggatatcgttaacgctgataagcgaaatatcctgtgggatgttcaggcctcgttcatgaattgcccgcagtacgccgatagcaatggaatcggaagcaacaaacagtgccttcggatagtcttcccgcgccagcatttgttttgccagttcataacccgacgaactggaaaaaccgccgcgccagatatcctcttcgcgtaccacttgtttcagtcggccatattccgcaaaggcgacctcacgaatatccgccttgccaggctcatcttcaccgccaataaaaccaatacgattaacgccctggttgatatagaagtcgatgatttctttactgatgcgtgccagatcgatatccaccgcatcgtaaccgctgccgggttcgtgaaagtcgataaaacagatattgtcggtcaacgcgctggcagcggcgcgcagggcgggcgtgggtttgccgacaattaaaataccggtgacgtttttaatgtctggtaagccgctgtgttcataacagttggtgagctcgatgcccagcttttcgcactgggtttcaatgccgtggcggatcgccagatagtaaggatcgttgatctccagctcctgctggtagctgtagatagccagaatatggtgttggttgactgcacctgtctggagtttacgggcactactggtcttgtactccagcttttcggcgatctcgagaatgcgatgtttcgtctcttctttcacattcaatgtcggatcgtcatttaagaccctggatactgtcgccagggatacgccagcttcgattgcgatgtcttttagtgttgccatgtttaccttttttactttccctgatgtgcgcccccattgtagaggaagtgcttatcgggtcacctgttttcagtaaataaagcgcgtttctttgacgctgtaacggtaacacagcggctcacgaatgtgatcacgcctgcattctccatttttagcctacaggattgagaaaaacttttgctatagtttagtaaaattttaccctaagggaggaagcaatggaaaccgtggcttacgctgattttgcacgtctggaaatgcgcgtcggaaagattgtggaagtgaaacgccatgaaaacgccgacaagctgtacatcgtacaggttgatgtggggcaaaaaacgctgcaaaccgtgaccagcctggtgccgtactacagcgaagaagagctgatggggaaaacggtggtggtcttatgcaatctgcaaaaagcgaaaatgcgtggtgaaacgtcggaatgcatgctgttgtgtgcggaaaccgatgacggcagtgaaagcgtgctgttaacgccggagcggatgatgcctgcgggcgtacgcgtcgtataaaaagatcggatggcgacgtcgtatcgccatccgatttgatattacgcttcttcgacacttactcgcatggccgccagcgccttacgcgccgctttgatcaccagttcacactgttcaatggtcagtgtcagtggcggttcaatgcggatcgttttggcgttattgagcgttccggccaccagtacgcgctggcggaacatctcgctggcaaagttatagccgatttcgttatcaacaaactcaatcgccatcaacatccctttaccacgcgcttcctgtaccagatcgggatattcccgcgccagttgacggaaaccgtccagcaacatatcgcctttttgctcagcctgagccggtaagttctgctccagcaacacattgatggtcgccagcgccgccgcacaggccagcgggttgccgccaaaggtggtggtatgcaggaatgggttgtcgaacagaactgaaaacacctcttcagtggcgatggtcgcgccaatcggcatcacgccgccgccgagcgctttggcaaggcagaggatatccggctgtacgttctcatgctcgcaggcgaacatcttgcccgtgcgccccatgcccgtttgtacttcatcgaggatcatcagtgcgccgaactcatcgcatagcttacgtacggcggtgagatagcccggcggcggcagaattacgccaccttcaccctgaatcggttcgaggatcaccgcagccacatcatcaccggtttttttgcactcgttaagagccgtgcgcatggcttcgatattgccaaacggcacatgacggaagcccggcagtaacggcataaacggtttgcggaaggtcgatttcgccgtggccgacagcgcgccaagtgatttaccgtggaacgcgccgctggtggcaataaaagtaaacttgccgcgcggtgactggtaagctttcgccagcttcagcgctgcttcaacggactcggtgccgctattacagaagaagctgtatttcagtttaccgggcgttagcgcagcaagggttttcgccaacatcgcccgtaacggatcgagcagctcctggctgtgcagcggttgtttcgcaagttgattctgtacggcggaaaccacaactggattacggtgccccacgttgaaaattccaaaacctcccaggcagtcgataaactcctggccctgggtgtcgacaagcgtatttaaacttcccgcttgccactctacggctccgtaatccccgccggcggtaacagatttgcgatactctaaaaaccccggattgacatgctctttgaagtattcaatcacctctcggttaagtgctttcatctcctcatgatccagcgttcgcttctcaatgagattcagggcgtgggcgctgcacgctaaagccgatgcgctcgaaggtaacctgttcaaaatatgctccggaggctcgcgtatcacatgataccgatttaagtattgcagggattgcgccactccggctgcgatcgcgaaaatcgggataaacacaaattcggttatcatttgtgcaatatttaatgctatctgttaacatttgttgttattttgcacggtttttgtcgggtatggatttgatgattgctgcgcaaatgcacgttttcagggcaataattgcctgatttttgggcaagataattaacgttttcgtatagtaacagagtgaaagtattttaaatcaaggaattagatttgtgtttaaatcgcaaattgcgatctaaatcaaattaatcggttaaagataaccgcagcggggccgacataaactctgacaagaagttaacaaccatataacctgcacaggacgcgaacatgtcttctcatccgtatgtcacccagcaaaataccccgctggcggacgataccactctgatgtccactaccgatctgcaaagctatatcactcatgctaatgacacttttgtgcaggtgagcggctataccttgcaagagttacaagggcagccgcacaacatggtgcgtcacccggatatgccaaaagcggcgtttgcggatatgtggttcaccctgaaaaaaggggagccctggagcggcatcgtgaaaaatcgccgcaaaaatggtgaccattattgggtgcgggccaatgcggtaccgatggtgcgcgagggaaaaatcagtggctatatgtcgattcgtacccgggcgacggatgaagagatcgcggcggtggagccgctgtacaaagcgttgaacgccggacgtaccagtaagcgtattcataaaggcctggtggtgcgtaaaggctggctgggtaaactgccttcattaccgcttcgctggcgggcgcgtggagtgatgaccctgatgtttatcttgctggcggccatgctttggtttgttgctgccccggtggtgacgtatatcctctgtgcgttagtggtattgttggcaagcgcctgttttgaatggcagattgtgcgcccgatagaaaatgttgcccatcaggcactgaaggtggcgaccggagaacgtaatagtgttgagcatctgaatcgcagcgatgagctggggctgacattacgtgcggtagggcaacttggcctgatgtgccgttggctaattaacgatgtctcaagccaggtgtccagtgtcagaaatggcagtgagacgctggcgaaaggcaccgatgaactgaacgaacatacccagcagacagttgataacgttcagcaaacggtggcgaccatgaaccaaatggcggcgtcggtgaaacagaactctgccacggcgtcggctgccgataaactgtcaatcactgccagtaatgcggcagtgcagggtggggaggcgatgaccacggtgatcaagacaatggacgatatcgccgacagtacccagcgcattggcaccattacttcgctgattaacgatattgcgtttcagaccaatattctggccctgaatgcggcggtggaagcggcgcgtgccggcgaacagggcaaaggttttgcagtggtggcaggggaagtgcgtcatttagccagccgcagcgctaatgctgccaacgatattcgcaagctgattgatgccagtgctgataaggtgcaatccggttcgcagcaggtacacgccgccggacggacgatggaagatattgtggcacaggtgaaaaacgtcacccagttgatcgcccagattagccattcaacgctggaacaggccgatgggctttccagcctgacccgtgcagtggatgagcttaacctgatcacccagaaaaatgccgagctggtggaagagagtgcgcaggtgtcggcgatggtgaaacaccgcgccagccgactggaagacgcggtgacggtactgcattaatcggtatgccggatccggcggttggagcacaatgcctgatgcgatgctggcgcatcttatcaggcctgcggggtgtgtagcgggtgtaggccggataaggcgcgtcaagcgtcgcatccggcaattgcaccgcgccactggcggatgcggcgattaatccagttgcgtaatatcaaaagcggcgcggtcgatcaccgcaatgatcttttttatttgtgcatcactgatatcgctctggttgacgcgtaaatccagcaccgctttaaaattatccagcgcccgcttcatttgcgggttctggcgcagcgccgcgccaacgcaacgcgctttgatgcgttcttcaatcatctccacctgttcgcggttttcttccagccactgcgcgccttgttcggtcagcgcaatctgcttcttacctccttcctcttcgcggatggtaatcagcgactgctcctgcagaaaatccagcgttgggtagatgacgcccgggcttggggtgtaattcccctgggttagattctcaatcgctttaatcaattcgtaaccgtggctgtcatcgcgcgagagaatatccagaatcaccagacgtaattcaccgtgaccaaagaaacgttgccgacgaccgccgccgcgaccgtggcgaccaccgcagcattgaccgtgttcatgctggtgaccgtgtccgcagtgctcgtgttctgacttctcacctttgcagcagccctcatggcgtggctggccttcatgtttacaacacccttcgtgatgatggctcatatcagcctccttttgcttaattagatatatctaatttatatctgatatgagcgttcttgcaagtgtaaaaatgatttttaaacgtggactcatctcacacgtaggccggataaggcgttcacgccgcatccggcgttgagtaatgatgcctgagaagaggcggttcgtcttatcagactatagacatatcagttctacaaatcgcttgcatttatcatgattaacaatcattatcatttgcgagttttatttagatatatctgattaccatcacgaaggcgataacaatgaataacaccccccgctacccgcagcgcgttcgcaatgatctgcgcttccgtgaactgactgtgttacgcgttgagcgcatcagcgccggttttcagcgcattgtcctcggcggcgaggcgctggacggttttacatcgcgtggctttgacgatcacagcaaactcttctttcctcaacctgacgctcactttgtgccgccaacggtaacggaagagggcatcgtctggccggaaggaccacgcccaccgtcgcgtgactatacgccgctgtatgacgaactacgccatgaactggcgattgatttctttattcacgacggtggggtcgccagcggctgggcgatgcaggcgcaaccgggcgataaacttacggtggcaggtccgcgcggttcgctggtggtgccggaagattacgcgtatcagctgtatgtctgcgatgaatccggaatgcccgcattgcgccgccgcctggaaacgttgagcaaacttgccgttaaaccgcaagttagtgcgctggttagcgtgcgggataacgcctgtcaggattatctcgcgcaccttgatggttttaatatcgaatggctggcacatgatgagcaggcggtagatgcgcgtctggcgcagatgcaaatccctgccgatgattacttcatctggataaccggcgaaggtaaagtcgttaagaatttaagccgccgctttgaagcggaacagtatgacccacagcgggtacgtgcagcggcttactggcacgcaaagtaactgatatataaaaagaaaaaggctgacgatttctcgtcagcctttgctatatctggtggcccctgctggacttgaaccagcgaccaagcgattatgagtcgcctgctctaaccactgagctaaggggccatggtagcggattataaagtaactccgtgtcgcaatccagccattaccgcgcgcctgctgtttttataaacaatgtattttcaatccgttatacttttcctggtgatgttagaaaggagtaaatatggttgaggatattttggctccagggttacgggtcgtgttttgcggtatcaaccctgggctttcatccgccgggactggttttccctttgctcatccggcaaatcgcttctggaaggtgatatatcaggccgggtttaccgaccgtcagttgaagccgcaggaggcacagcatctgctggattatcgttgtggcgtcaccaaactggtagaccgtccaacggtgcaagccaatgaagtttcaaagcaggagctacacgcaggcgggcgtaagctgattgaaaaaattgaagattatcagccgcaggcgttggcgattctgggcaaacaagcatatgaacagggattcagccagcgcggtgcacagtgggggaaacaaacgctcaccattggttcgacgcagatttgggtgctgccaaatcccagcggtttaagtcgcgtttcactggagaaactggttgaagcgtatcgcgagctggaccaggcgctggtagtgcgtgggcgataaaaaacgccaccgaaaaggtggcgtttgtgcagagggcctagtgccgggtgcggcgtaacgcctgatccggcctaccgattaatcgtccaggaagctacgcagcacttcagaacggctcgggtgacgcagtttgcgcagcgccttcgcttcgatctgacggatacgttcgcgggtaacgtcgaactgtttacccacttcttccagcgtgtggtcggtgttcatatcgataccgaaacgcatacgcagaacttttgcttcacgcgcggtcaggccagccagcacgtcgtgcgttgccgcacgcaggctttcggtggtcgcagaatccagcggcagctcgagggtggtatcctcgatgaaatcccccagatgcgaatcttcatcatcaccgatcggcgtttccatggagattggctctttggcgatcttcagcactttgcggatcttgtcttccggcatcagcatacgttcagccagttcttccggcgtcggttcacggcccatctcttgcagcatctggcgagaaatacggttgagcttgttgatggtctcaatcatatgcaccggaatacggatggtgcgcgcctgatccgcgatagagcgggtgatcgcctgacggatccaccaggttgcgtaggtggagaacttgtaaccacggcggtattcgaatttatcaaccgctttcatcagaccgatgttgccttcctgaatcaggtcaaggaactgcaagccacggttggtgtatttcttagcgatagaaataaccagacgtaagttcgcttcaaccatctctttcttcgcacggcgggctttcgcttcaccgatggacatacgacggttgatatctttaacctgctcgatggtcaggccggtttcttcttcaatctgctgcagtttttgcagggcgcgatgcacttcttcagagacatcgtgcagtttttccgaccacggcttgttcatcgcaattgccgcgttgaaccaggtatcgctggtttcgttgccggtaaacagggtaatgaagtttttcttcggcattttgcactgctcaacgcagagcttcatgatcagacgttcttgcgtacgaacgcggtccatcatgacgcgcatgctgttgaccaggtagtcaaactgcttcggcaccaggcggaactgtttgaatacttcagacagtttcaggatctcttcctgagcggtagcgtgactgcgacctttcgctttgatggtgtcacgcgttacaacgtactgagcgcgtagttccgcaaatttttcgcgagccagttccgggtcgatgctgttgtcatcatcggcgctgtcgtcatcgccatcttcttcgtcttcatcttcgtcatcgtccagatcttcctgggaaagctcagaaccgacgtgagtggcggtaggtgccagatcttcttctgcgttcgggtcaacaaagccggtgatcagatcggacagacgcgcttcttctgcttcaacacgatcgtactgttccagcagataggtgatcgcttccggatattcagcaacggagcattgaacctggttgatcccgtcttcaatacgcttagcgatgtcaatttcgccttcgcgggtcaacagttcaacggtgcccatttcacgcatgtacatgcgtaccgggtcagtcgtgcgcccgatttcagattccacgctggaaagcacctgcgcggcggcttcggcagcatcttcgtccgcggtgttttcagccagcatcagatcatcggcatccggtgcttcttccatcacctgaatgcccatgtcgttgatcatttggatgatgtcttcgatctgatctgaatcgacgatatcttccggcagatggtcattgacctcggcataggtcagatagccttgctccttaccacgggtgacaagaagtttcagctgtgactgcgggttttgctccataagacggtatccacacttatttcatgaggttggtgttgggcgattgacccgatgtccttcagccgttaacgctgaaatccaacggttgtttaccgccaacgataattacgagggcgtacttatatatttgccgctgcctctcagtgcggctgtcgggggcttcccgatcgctcttcggcacttaagccgttaaatcactttttcgccagctcctggtttaatgtccagagctccaggcgttcttcgttgcttaaaccatgcgtgcgctcacgagcgattaactcttcctggcgcagttcaagcagcgaatcaaacatatggttgagtgagtcggtgaaggtttgctcagcaatattcttatctgctatatcgtcccacatcgacagtttttcaagggtggcagcattatttgtaccacgatagtgctctaaaagttgcccggtggtcagacctggctgggagagacaagtgttgaccagttctctgaataagccaagtccagggagcttattttcatccagattctcaagcggcgggaccaacgtcgctaattctggattttgcaccagcaaccctataagtatacgcatggtcgtgcgttttagctgcggaacagggcgagaaacgccgctctctgccgcttttggcattaatcgttcaagctggctgtcatcaagtatgcctaatttgttgcctaattcctgacgaagatatattcgcagcgtttcgcccggcacttgcgatatcaatggtagtgccagcgtactcaaacgtgcgcgcccgtcaggggtactcagatcaacttgcggcatcagactgttaaacagaaatgcggagagtggcatcgcctgctccatccgcgcttcaaacgcttctttaccttcttttcgtactagcgtgtcagggtcttcgccatcaggcaaaaacataaagcgtagctgacggccgtctgtcatgtaaggcagcgccgtttccagcgctcgccaggcggcatcgcggcctgcacggtcgccgtcataacagcaaatgacattgttggtcgcgcggaacaacagttgtatgtgatcggcggtggttgacgtacctaacgacgcaacggcgtaattaatgccgtattgcgccagcgccaccacgtccatatagccttcgaccacaagcagacgattgggttcagcgttatcctgctgcgcttcataaagaccgtaaagctggcggcctttatggaaaatgtctgtttccggcgagttcaggtatttgggggtatcgttgcccagcacgcgcccgccaaaaccaatcacccgaccgcgtttatcgcgaatggggaacatcacccgctcgcggaaacgatcgtaactgcgtccctgatcgttagtgaccaacatccccgcatcaatcaatgactggcgattttctggattgccgccaaaccgcttcaggacgttgtcccagccggggggcgcaaaaccaatcgcaaagcgagcgataacctcgtggcttaatccgcgtttttccagatactggcgcgcagacgtggcaacaggttgttgtaaagattgttggtaaaacgtattcagaccgtccatcaactgataaagcgtttgcctctgatggcgctcgatctggctggggccgctgcctgcttcaaatggcacttcaagattgtgcattgctgccagctcttcgaccgtttcgacgaactcgagcttgtcgtagttcatcaggaagtcgatcgcgttgccgtgcgcgccacatccaaagcagtggtaaaactgtttctcaccgttaacggtgaaggacggggttttctcgttgtggaatggacaacacgcgtggaaattcttgccctgctttttcagcttcacacgggcatcgatcagatcgacgatgtcagtgcgtgccagcagatcattaatgaatacgcgtgggattcgtccagccataggccccgatttttagcaattcataaacgaaaataagccgcgcattcctttcggaagcacggccttacaactacaactcggtctgatcggagagcaacgctctcggggaattagtacagacgagtgcggcgtgcgttttcgcgagccagtttcttcgcgtgacgtttcactgcagaagctttagcgcgcttacgttcggtagtcggtttttcatagaactcacgacgacgaacttccgccagaacacctgctttttcgcaggaacgcttgaagcgacgcagagctacgtcgaacggctcgttttcacgtactttaattaccggcatgtgcctctcacctttgattaattcggtttgccgctggcatcaacgccagcttatttcaaaatggtgcggaattttactgcaattgctgctgctttgtaaagcaccgcggccttttttgaaagggacttttataagggtgaggagtatacacgaggctttctccaggggcgaacaaagttttacatcaacccgcattggtcctacactgcgcggtaataaagcgaggtaaaacaagtcatgcgtgtactgggtattgaaacttcctgcgatgaaaccggcatcgccatttacgacgatgaaaaaggtttgttagccaaccaattgtatagtcaggtgaaattgcacgctgactacggcggcgtcgtgcctgaactggcctcccgcgatcatgtgcgtaaaaccgtaccgttgatccaggcggcgctaaaggagtctggtttaacggcaaaagacattgatgctgtggcctataccgcaggccctggattagtcggcgcgctactggttggcgcgaccgtggggcgttctctggcgtttgcctgggacgttccggcgatccctgtacaccatatggaagggcatctgttagcgccgatgctggaagataacccgccggaatttccgtttgttgcgctgcttgtttccggcggtcatacgcagttaatcagcgtgactggcattggtcagtacgagctgctcggcgagtctatcgatgatgccgccggggaagcgtttgataaaaccgcgaagctgctggggctggattatcctggcgggccgttactgtcgaaaatggcggctcagggtactgccgggcgctttgtcttcccgcgtccgatgaccgaccgtccggggctggatttcagcttctccggcctgaaaaccttcgcggcaaataccattcgtgacaacggcaccgacgaccagacgcgtgctgatatcgcccgcgcctttgaagatgcggtggtcgatacgctgatgattaagtgcaagcgggcgctggatcagacgggctttaagcgactggtcatggcgggcggcgtgagtgctaaccgtacgttacgggcgaagctggctgaaatgatgaaaaaacgccgcggcgaagtgttctacgcgcgtccggaattttgtactgataacggcgcgatgatcgcctatgccggaatggtgcggtttaaagcaggcgcgacggcggatctcggcgttagcgtgcgtccgcgctggccgctggcggagttaccggctgcgtaaaactattgggtgccggagagcaatttccggcaccgtcctcacttaaagcaacaccacgggcatccacagtaagccggtaatcaccagcaatacgaggaatatcagcccaaaaatcgcccccagtcgccagtaatccgccgttggcagataaccactgccgtagtaaatcggactggggccggtggcgtatggtgtaagaatgctccccagaccaattgccgcaccaaccatcaggcagaacaccggcagcgggatttccggcatcgccagcgcagcggcaatcatcatcggtgcgagagcggaggtatacgccgtggcgctggcgaaaaagtagcgcagtagataaaacaccacaatcaacgccaccatcaccatcgttggcgaataaccgcttaagctgcctgctaacagtttgccaaaccagctaataaaaccggtgttgttgagtccggtggcgagggtgataagcgaggccagccagaagaaaacgttccacgccgctttattactgacaatgtcgtcccaactgataatgcgcagaagcagcatcagtgccaccacgctgtaaccgaccatcgcggcatcgatataatcaccgccgaaaatccacagcaccagcgcgcctaccatcagccccagcatccgtttttcacgcgaacagagcgggcccattgcctgcagttccgtctctgcccagcgcggcacctgatcgccagacttcagtaccggcgggtacagcacgtaagccagccagggaaccagcagaaccagtaaaatgctgagcggcaacatcccgaggaaccagtcgccccaactcagcgtggcgtgagatgcgcttttcatcagtccaattaacagcaagtttggtgccatcgccgtcaagaaaatggcgctggtcacgcagtcggcaacaatccccatccacatgatgtacgagccaatgctgcgcgaactgctgtcgtttggttgtgattgatagagcggtggcaggttacggatgatgggatagataatccccgcaccacgcgccgagttggacggtgttacaggtgcgaggatcagctcggagaacatcaccgcatagccgagaaacagcgtgcgatgtcccatctttttcaccagaatcagcgcaatgcggcgtccaagcccggttttttcatagcctgtgccaaacataaaggcggcgaaaatcagccagataaccgaattagaaaaaccggaaacggcccacgagagggattttgcagtgaatttaaagcctggctgagcgagctgctccgggctgaacagcagccagggagagagtatggcgatgatggatatacccaccatcgccaccacggcacccggcacgggttcgaggatcagtccaacgatcacgccagtaaaaacggcaaagtagagccaggtatggttctccagccctgcgggaaccggaagtagagcaataatggcgatgaccgccagcggcgcaagatatcgccaccattcagtggaaggtttcatcgtgttatgcctgcgaaaaaggagaggggtgagcctctccgggagggttatttgatgtaatggacgtgctcgcagatctcttccacgatgggatcgcggcgttcggcgaacagctttttgttttcggctatcaggttgttgccgtgggtatcaatagagacaatcagcgggccgaactctttgacccggcagacccacagtgactccggcattccgagctctgtccagtgcacttcttcaatctcttccacctgggttgccgccagcaccgcgcagcctgccgggaaaatcacatgtagcgccttgaatttctggcagccttcttcggttagcggccccataccacctttgccaaccaccagtttcacgccggtctgctcaataaattcacgttcaaaactttccatacgcatactggttgtcgggccgacggagaccatctcccatttgtcgccgtttttgcgcacgatggggccagcgtggaaaatcgctttgccgttgagatcgtaagggatcggacgtttcagttcgatcaaacggcggtgacaaacgtcgcggcaggtcaccagcgtaccggtcaggtagatcacatcgccgacgcgaatatcttgcagatcttcagctttgatcggggttgtcaggatctttttcataacgcgctccgggtgtgagacagattttcaaaggtgagatcggcatgaaccagcagcgtgccgcgacgatgcgcccagcagccggtagagacagcaacgccgatggttgacggatggcgggcggcagattcgatatgtacgcccatcactgaactgttgccggtcagcccttgtggaccaatccccagacggttgagtccttcttccaggcgtagctccagttctgccgcttttggattgggatggcggctgccaatcgggcgcaaaatggctttacgcgagagtacggcggcggtttccaccgaggtggcgatgcccacgcccaccagtaccggtggacaggcgtttacggcgagggtggagatattttcgaagacgaatttcaccacgccttcgtagccttctgacggcattaacactttcgagcggccaggtagcgtgcagccgccgcctgccatgtaaacttcgatttccgcatcgtcattgtcggggatgatgtcccaggtgacccacggtacgccgctaccggtatttttgccggtgtttacttcgtcaaaaatttctaccgcattgtgacgtagtggcgctttgacggttgcctcttccacggcttgtttgagtatgctttgcagctcgccaagcagtgggaagcgggaaccgactttaacgaagaacataatctccccggtgtcctgacaggcaggacgattcaggtcaatcgctttttgcatgttgtcgaacatcgtatggtagataattttccccatcgacgacgtttcggcatcctttagctgttttagtttatccaccacgtcatcaggcattcgggtagaaatcatggcggtaaagttagcgacaatctctgtcaacttattcactgcctgttgcttattactttcgctcatcatggcaactccagtttttgtatttgtctggaaaaattcaccgccacaaactaccactaaaaatgtggttttatattttttgccaccgtgaatatgtaattaacagttcgtgaatcaacgcgaaaataagaatgaatattgcgccagagcagggaatggcaatgttttgcgaaatacactgcgcttatcacaactgcggataattaacgatgctgaatagctggcctttagccaaagacttgcaggtactggtagaaatcgttcacagcgggagttttagcgccgcagcggcgacgcttgggcagacgcctgcatttgtcaccaagcggatccaaatccttgaaaatacgctggcaacaacgctgctgaaccgctccgctcgcggcgtggcgctgactgaaagtggccaacgttgttacgaacatgcgttggaaatcctcacccaatatcagcgactggtcgatgacgtcacgcaaatcaaaacgcgcccggaggggatgattcgtattggttgcagttttggttttgggcgcagccatattgcgccagctattaccgaactgatgcgcaattatcctgagttacaggtgcattttgaattgttcgatcggcaaattgatttagtgcaggataatattgatctggatattcgtattaatgacgaaattcctgattattatattgcgcatcttttgacaaaaaataaaagaatattatgcgcagcacctgagtatctgcaaaaatatccgcagccacaatccctacaggaattaagtcgtcatgactgtctggtgaccaaagagcgcgatatgacccatggaatatgggagttggggaacggtcaggagaaaaaatcggtgaaggttagcgggcatctttcctccaatagcggcgagatcgtgctgcaatgggcgctggagggcaaagggattatgctgcgttccgagtgggacgtgttgccgtttctggagagtggcaaactggtgcgagtattgccggagtatgcacaaagcgccaatatctgggctgtttaccgggagccgctctatcgcagcatgaaattacgtgtctgcgtggaatttctggcggcatggtgccagcaacggctgggcaagcccgatgaaggctatcaggtcatgtagatccaccagaaatcactcgggatccttttcgcgctttcttttgaatttcgtccagatttttgtctcctgacgacgccacagacgctggatgttgtcatgatgacgcagcaggatcaggcaagagagcatcgaaaccgggaaggtgaattgtggcttaaaccaccagacataaaatggagcaatcagtgcactgacaatcgctcccagcgacgagtatccgctcaatagcacagtcagtaaccaggttcccgccattactccggtgagatcccagccaatgggtgcgatggcaccaaaagcggtagcaacgccttttcctcctttaaaaccgaagaaaacgggccagatgtgtccaagacaggcggcgatggcaattaagcctagccagaaggggctgacacctaattcatacgcgccccagacgggcaacattcctttcagaacgtcgaaaatcagtactgctacggctgctcccttgccaccgatacgtaacacattggttgcgcctggattgccggagccgctggttcgcggatcgggcagcccacacaagcggcaaaccagaatggcactggaaatggagccgcagaggtacgcgatgaggatcattccaggcgcgattgcactcataagctgttccgttttgaaaattcgtgttcaacgatgaatctgtggataatacgcacatttcgccggaagtggtatccggttagccaaaaagcaggcaggacgtgatggatattgtatttatagagcaactttcggtaatcaccactattggtgtttacgactgggaacagaccatcgaacagaagttagtgttcgatatcgaaatggcgtgggataaccgtaaagcggcgaaaagtgatgatgtggcggattgcctcagttacgctgacattgcagaaacggtggtcagccacgtcgagggggcgcgttttgcgctggtggaacgcgtggctgaagaggtggcggagctgctgttagcacgcttcaactcgccgtgggtgcgtatcaaactcagcaagccaggcgcagtggcgcgggcggcgaatgttggcgtaatcattgagcgtggcaataatctgaaagaaaataattaattttacagctgttaaaccaaacggttataacctggtcatactgcagtagttcggacaagcggtacattttaataatttaggggtttattgatgagcgatatgcactcgctgctgatagcggcaatattgggtgtggtcgaaggattgacagaatttctgccggtatccagcacgggccatatgattattgtcggtcatttgttggggtttgagggcgacacggcgaaaacctttgaagttgtgatccagttaggatcaattctggcggtagtagtgatgttctggcggcgtctgtttggcctgattggcatccactttggccgcccgttgcagcacgaaggagaaagcaaaggtcgtttaacgctgatccacattttgctggggatgattccggcggtggtactggggctgttgttccacgacacgattaagtcattgtttaacccgataaatgtgatgtatgcgctggtcgttggcggtttgttgctgattgccgccgaatgcctgaagccgaaagaaccgcgcgcaccgggtctggatgatatgacctatcgtcaggcatttatgattggctgtttccagtgtctggcgctgtggccgggtttctcccgttccggggcgaccatttcaggtgggatgctgatgggggtgagccgttacgctgcttccgagttttcgttcctgctggcggtgccgatgatgatgggcgcaacggcgctcgatctctacaaaagctggggcttcctgacaaacggcgatatcccgatgtttgccgttgggtttatcaccgcttttgtggtggcgctgatagcgattaaaaccttcctgcaattgattaagcgcatttcgtttatcccgttcgccatttatcgctttattgtggcggctgcggtgtatgtcgtgttcttttaattgaggaatagtgtcggatgcttggcgttgtcaacgattgcgtaggccgaataaggcgttcacgccgcatccggcaatcaacgcctgatgcgacgcttgcgcgtcttatcaggcctacaactgtcgttgacatgtagccggataaggcgtttacgccgcatccggcaaaatgcccaatactcattcaggctttgggcaacgttgttccttccagctggctaccgccgcaatccgccgtcgggtcagctcctcgcgaatctccacacctttaaatcccgcttcaacgacggcttttgtcggcactgactgcgccacttcccaggcttcgcgcaaccagcggccttgcgggtagtccgctgattcaaaaccggttctgccgcgcacgtcagcctcgctggtcagcgccagttgctcgacacgctgcggtttacgccaggcatcgatggaatcaaataatttgacgatggtttttgggttcagcattgggaaggtgtggatgagatcgtgaaactcagccaccagtctggctaaatcgcgaatttcatttggcacgcgcagacgctggcatagttgttccactaacttaacacccgccgggccatgaccatgatgacgcggccagagttctggcggcgtcagccctttaccgagatcgtggcataaagttgcgaaacggacatcgacctgcggactcagcatcgccgccattgagagcgtcattaaggtatgaatacccgtatcgatttccggatgccacttggcaggggccggaacgccaaacagtgcgtcaatttccgggaataaaacgcgcagtgcgccgcaatcgcgcagtacctggaagaacacctgtggattgcgggtggtgagggcgctttccgtctctttccatacccgttcaggcgtcaggtgttccagttcacccgcatgggtcatctcgcgcatcaacgccagagtttcatcggcaatacgaaaaccgaggtgggcataacgcgcagcaaaacgcgccacgcgcaatacgcgtaacggatcttcgccaaaagcgggggaaacatggcgcaacagacgattttgcagatcgcccagaccgttgtacgggtcgataatctcgccgttatcgtcctgggccagcgcattaatggtcagatcgcgacgcttaagatcatcttccagcgtgacatccggtgcggcatagcaagtaaaaccggtgtaaccggaaccggatttccgttcggtacgtgccagcgcatactcttcatgcgtttgcggatgcagaaacacaggaaaatcgcggcctacctgctggtagcccgcgtcgagcatctcctgtggcgtactgccgaccaccacccaatctctgtctttgaccggtagccctaacaatgcatcccgaacagcaccaccgaccagataaatcttcacgccatcatcccttcgtcaaatacacaattcctaataataagacagtgcaacgaagaaggcgatttagttcatccagcgatctttgcgtttgcggcttgggatcaggtgcggcagtaccagaccgagcagcaagccaagccccagcacgccaccgccatacataaaccattgcatgatgatggtgcgctgtttgtcatccagctgtacgctggcggcatcgacctttttctgcgcgacaatcagctcgtttttcagtttctgattttcttcttttaacccgttgatcacgctgtcgctctgcgccactttttgctgcatttctgcggtgcgctgattccaggtgttatcgatattggtgagtttatcggtcagggttttgacctgattttccagatctggcacacgggagcgcaggcttggctcagtgctaagttgtttcaacgggatccaggcggtacggccagagctgtctttcacctgggcataattggtgttggcgtcagtttgtaataaggtcacttcctcgccggcgttaaccgtgcccacgaggcgataatgatctcccggaccgctgcggacccaggtattcagttcgtcggaaacatagcgcgtttcttcagcgtgtgagacggcagtcgcgctaagtgcgagtaaagttaatccgatcaggcgtaattttggcatcaggctgtcgttattgtcatggaaagtggaacgatagtagtggcatcagtgtcgctacgcaaagcattcgacatcaatcggaatcctctgtgtcaggtcttgccactgcttcaaacttttacgcccgtcaaattgcccgttgcatggcaatttggcgcaaaatactatctactgacaaaaaagatcgcattaagttcgccgttcatcgtcacttatgtgacataaccgataagtaaaggccatggctcaggaaatcgaattaaagtttattgttaatcacagtgccgttgaggcgttgcgtgaccatctcaatacgctgggcggcgagcaccatgaccccgtgcagttgctgaatatttactacgaaacgccggataactggctgcgtgggcacgatatgggcttacgtattcgtggcgaaaacggtcgctatgagatgaccatgaaagttgcaggaagagtgacaggcggcttacatcagcgcccggaatataacgtggcgttgagcgaaccgacgctcgacctggcgcagttaccgacggaagtctggccgaacggcgaattgcccgccgatctcgcctcccgcgtgcagccgctgttcagcaccgatttttatcgcgaaaaatggctggtggcggtcgatggtagccaaattgaaatcgccctcgaccagggggaagtgaaagcgggtgaatttgctgaacctatctgtgagctggaactggaactgcttagcggcgacacgcgcgcggtgctgaaactggcgaaccaactggtatcgcaaaccggattacgccagggcagcctgagcaaagcggcgcgtggctatcatctggcgcagggcaatccggcgcgtgaaatcaaaccgaccaccattttgcatgttgcggcaaaagccgatgtggaacaggggctggaagcggcgctcgagctggcgttagcgcaatggcagtatcatgaagaactgtgggtacgcggcaacgatgcggcgaaagaacaggtgctggcagccattagcctggtccgtcatacgctgatgctgttcggtggtattgtgccgcgtaaagcgagcactcacttacgtgatctgctgactcaatgcgaggcgaccattgcttctgcggtgtctgccgtgacggcggtctactctaccgaaacggcaatggcgaagctggcgttgaccgaatggttggtaagcaaagcatggcagccatttttagatgccaaagcgcagggcaaaatcagcgactccttcaaacgctttgccgatatccatctttcccgccatgccgctgaactgaaaagcgttttctgccagccgttaggcgatcgctaccgtgaccagttgccacgcctgacgcgtgatattgactcaatactgttgctggcgggttactatgatcctgtcgtcgcgcaagcctggctggagaactggcaggggctgcatcacgctattgcgaccgggcaacgcatcgaaattgaacatttccgtaatgaggcaaacaatcaggaaccgttctggttgcacagcggaaaacgttaatcaggcaaggataaaatcgcttatgaagccgctctcttcaccgttacagcagtactggcagaccgttgttgagcggctgccagagcctttagccgaggaatcacttagcgcacaggcgaagtcagtacttacttttagtgattttgtgcaggacagcgtgattgcgcatccagagtggctgacggaactggaaagccaaccgccgcaggccgacgaatggcagcattacgcggcatggttgcaggaggcgctctgtaatgtgagtgacgaagccgggttaatgcgcgagctgcggctattccggcggcgcattatggtgcgcatcgcctgggcgcaaacgctggcactggttactgaagagagcatattgcagcagctcagctatctggcggagacgctgattgttgcggcgcgtgactggctgtatgacgcctgctgccgcgagtggggaacgccgtgcaatgcgcagggcgaagcgcaaccgctgctgattttaggcatgggtaagctgggcggtggggagctgaatttctcctctgatatcgatctgatttttgcctggccggaacatggttgtacgcagggtggacgccgggaactggataacgcgcagttttttacccgcatggggcagcggctgattaaagtgctggatcaaccaacgcaggatggcttcgtctatcgcgtggatatgcggctgcgtccgtttggcgaaagtggcccgctggtgctgagctttgccgcgttggaagattattaccaggagcaggggcgcgactgggagcgttacgcgatggtcaaggcgcggattatgggcgatagcgaaggcgtctatgctaacgagttgcgtgcgatgctgcgcccgtttgttttccgtcgttacatcgatttcagcgtgattcagtcgctgcgcaacatgaaagggatgattgcccgtgaagtgcgtcgacgtggtttgaccgacaatatcaaactcggcgcaggcggcattcgcgaaattgaatttatcgttcaggtgttccagctcattcgcggcggacgcgaaccgtcgctgcaatcgcgctctttactgccaacgctcagcgccattgccgagctgcatctgctttctgaaaacgatgctgaacaattgcgagtggcgtatctgttcctgcggcgtctggaaaacctgctgcaaagcattaacgacgaacaaacccagacgcttccttctgatgagcttaatcgtgcgcggctggcgtgggcgatggactttgctgactggccgcaactgaccggggcgctgaccgcacatatgaccaatgtgcgccgggtgtttaatgaattgattggcgacgatgaaagtgaaactcaggaagagtcgctgtcggaacagtggcgtgagctgtggcaggatgcgttgcaggaagatgacactacgccagtgctggcgcatcttagcgaggatgatcgcaaacaggtgctaacgctgattgccgatttccgcaaagagctggataagcgcaccatcgggccgcgaggacgtcaggtgctcgaccatctgatgccgcatctgctaagtgatgtctgtgcgcgtgaagacgctgccgttacgctgtcgcgcattaccgccttgctggtggggattgttacccgcaccacctatttagaattgctcagtgaattccccgcggcgcttaaacatttgatttctctgtgtgccgcgtcgccgatgattgccagccagctggcgcgttatccattattgctggatgaattgctcgatccaaacaccctttaccagccgacggcgaccgatgcctaccgcgatgagttgcgccagtatttgctgcgcgtgccggaagatgacgaagagcaacagcttgaggcgctgcgtcagttcaaacaggcgcagctgttacgcatcgccgcagcggatatcgccggtacgctaccggtgatgaaagtgagcgatcacttaacctggctggcggaagccatgatagatgccgtcgttcagcaggcgtgggttcaaatggttgcccgctacggtaagccgaatcacctgaacgaacgcgaagggcgtggttttgcggtggtcggctacggcaagctgggcggctgggagttaggctacagttccgatcttgaccttatcttcctccatgattgcccaatggatgcgatgactgacggtgagcgggaaatcgacgggcggcagttttatctgcgtctggcgcaacgcattatgcatctgttcagtacgcgtacctcttccggcattttgtatgaagtggatgctcgactgcgtccgtccggggcggcgggaatgctggtgacatccgcagaagcatttgccgattatcagaaaaacgaggcctggacgtgggaacatcaggcgctggtgcgtgcgcgtgtagtgtacggcgatccgcagctcaccgcgcactttgacgcagtgcgtcgcgagattatgacgctgccgcgtgaaggtaaaactctgcaaacggaagtgcgggaaatgcgcgagaaaatgcgcgctcatctcggcaataaacatcgcgatcgctttgatatcaaagctgatgaagggggaattaccgatatcgaatttattacccaatatctggtgttgcgctacgctcatgaaaaaccgaagttaacgcgctggtcagacaacgtgcgtattctggaactactggcgcaaaacgacattatggaagagcaggaagcgatggcgctgacccgtgcttacactacgcttcgcgatgaacttcatcatctggcattacaggaattgccgggccatgtgtcggaggattgcttcaccgcagagcgtgaactggtgcgggcaagctggcagaagtggctggtggaagaatgaagtatggtattatcgcgcgcaaattttgaatctctcaggagacaggaatgaaagtaacgctgccagagtttgaacgtgcaggagtgatggtggttggtgatgtgatgctggatcgttactggtacggccccaccagtcgtatctcgccggaagcgccggtgcccgtggttaaagtgaataccatcgaagaacgtccgggcggcgcggctaacgtggcgatgaatatcgcttctctcggtgctaatgcacgcctggtcgggttgacgggcattgacgatgcagcgcgcgcgctgagtaaatctctggccgacgtcaacgtcaaatgcgacttcgtttctgtaccgacgcatccgaccattaccaaattacgggtactttcccgcaaccaacagctgatccgtctggattttgaagaaggtttcgaaggtgttgatccgcagccgctgcacgagcggattaatcaggcgctgagttcgattggcgcgctggtgctttctgactacgccaaaggtgcgctggcaagcgtacagcagatgatccaactggcgcgtaaagcgggtgttccggtgctgattgatccaaaaggtaccgattttgagcgctaccgcggcgctacgctgttaacgccgaatctctcggaatttgaagctgttgtcggtaaatgtaagaccgaagaagagattgttgagcgcggcatgaaactgattgccgattacgaactctcggctctgttagtgacccgttccgaacagggtatgtcgctgctgcaaccgggtaaagcgccgctgcatatgccaacccaagcgcaggaagtgtatgacgttaccggtgcgggcgacacggtgattggcgtcctggcggcaacgctggcagcgggtaattcgctggaagaagcctgcttctttgccaatgcggcggctggcgtggtggtcggcaaactgggaacctccacggtttcgccgatcgagctggaaaatgctgtacgtggacgtgcagatacaggctttggcgtgatgaccgaagaggaactgaagctggccgtagcggcagcgcgtaaacgtggtgaaaaagtggtgatgaccaacggtgtctttgacatcctgcacgccgggcacgtctcttatctggcaaatgcccgtaaactgggtgaccgtttgattgtcgctgtgaacagcgatgcctccaccaaacggctgaaaggggattcccgccccgttaacccgctcgaacagcgtatgattgtgctgggcgcactggaagcggtcgactgggtggtgtcgtttgaagaggacacgccgcagcgcttgatcgccgggatcttgccagatctgctggtgaaaggcggcgactataaaccagaagagattgccgggagtaaagaagtctgggccaacggtggcgaagtgttggtgctcaactttgaagacggttgctcgacgaccaacatcatcaagaagatccaacaggataaaaaaggctaaccggaaagcggttcacagatctcgcttcgtacatggcaggcctattgacgctgttgttttttcaacctagagtaaaggaacaagggtaagggaggatttctcccccctctgatgagttgttagtaagtcgggaaacttaacagtaacaacacaaccagtatgatgacgaacttcatcataaccctttccttatacaaggccccttcttcgggaggggctttcccgtttcagccccttgctgccccccgattgttgatgagcgccggaccccgcgcaatgctttcccagaggcaattttgccttccccgagcggtcacgcaaaacgctgcaacgtcctgagcatttgcaccttttagcggaacgcagatataaaaaatccccggctttttgggccagggatatgtgttaatgaaaccttcttgacgctgattttttttcaacctaaagtaaaggaacaagggtgagggaggatttctcccccctctgattggctgttaataagctgcgaaacttacgagtaacaacacaatcagtatgatgacgagcttcatcataaccctttccttctgtaaggcccccttcttcgggaggggctttcccgtttcagccccctgctgactccccgattgttgatgagcgccagaccccacgcaatgctttctctgatgcagttttgccttccccgagccgtcacgcaaaatgctgcaacaacctgatcatttgcactttttagcggaacgcagatataaaaaatccccggctttttgggccagggattattcctggaagagggtttactctgctttttcttcgacgggagttgttgaggttaagggtgaagtcaatgccgccagtgagccgcctgaaacgccaatttcattgagcaaggagtcaatcagcggtgcctgtgtgcggtaagagagagcggctgataatgcttgttccgccaggtttccgccccccacattacccgtgtttgcatcacccgcagcgccgccacgattcagaccatcgacctgaataatcttgataccgtcgattgacttcatcggctcaacggatttctctattaccgcaggcagcgcctgcaacaaggccagtttgaatttaaggctggtttgttcatcagaaagtacgttgatagcatcgttcagcgcacgttgtgcttctgcttccgccagaccctttttacgtgtagcttcggctaactcaacgatagccgccgcctgcatctctgcggcttctttttctgctttcgcccgcacggtcagttcaaccgctttggtttctgcatcctgcgcggcagcgattagggcaacttgtttagcacgatcggcttcggcagtctggcgagtggtttctacgttttgttgggcgcttaccgcttctgcaagtgcgagattagcacgcgcttctgcctgggactgttgttccgatttggcggcaatagcgatcgatttcgtctggttagcgatttcggtgacctgctgctgttcgatctctttaatgcgaacttcacgttcagcttcaacctttcttgagcggacggcctgttcgcggtcgatttctgtttcctgaatctgtcgttcagccagaattcgtgtctgctctgcttcacgacgacgttcagcttcaaaagccgcaatacgtgcattctgttcggcagtacgggttttaacctgctgctcctgctcaagcgtcataaacgcttcttgctgttcaatctccagcttgcgcgatagcgcatcgcgatttttttcacgcaccgcaacttctacatcctgttcaacttcgttacgttcgcggcgacggcgctctgtttcctgagtcagtttggttaaaccttcggcgtcaaaggcattgttcggattgaaatgttctttcgaggtctggttaaagttggtaagtgaaacgctctccagttccagaccgtttttcgacaggtcttctgccactgtattttgcaccccctgcacaaagttctcgcgggtatcctgtaactcatgcatggtcatttgcgcagctgttgcacggagggcatcgacaaatttatcttcaaccaacatacgtaagtcttcaggcgacagggtgcgttgccccagcgtctgggcagcggtggcaatcccttctactgaaggttttacccgcacaaagaaagcgactactacatcgacgcgcatacgatctttcgtaatcaggctatcaatggttgagcggctgacttccagcttcagagtattcatattgatggggattatttcatgaaagatcggcatcacgattgcgccaccgctcattaccactttttgcccacctaaaccagtacgaacaaaagcttgctctgccgaagcgcgacgatagagcctggcgaaaataattccaataataaacagaatgcatacggcaataattgcggtaaacatccaggagggcacagaattaacaatatcatccattattaaatttccttttgattaataaattacaatatttggggccagggattattttccgccaaatatcgcgttgcagaaagtcggcaaataattaacactttgtctcctttagtgaaaatttttccttcttcaggctccagtagtaaataatgtatttggccaaattgatcggtgagttttccttcgcagggattacctgaagtggcttgatgaccggtaattaacgccatgctaccaatatattcttcttctgtaatagctgaactatggtcgcgtggaatccagggcgcaactattttaccggtataatgcaccgcaataatcgtaaacagtaaactgacaggaaccacgaacaggttcgacagtggtgattgccagaccatgatgcaggcatgctgcaacaggatgccaataagaccaaaaaaaccagccagtaagcagagaacgacgagagctggcaatcttccaatattgagataatgaagtgcctggctaatatgacctgtggttatagaatcataatggtcaagatgtgcatcaagagcaccggagagcatgtgaccgcagataagcgcaaaaatttctaacaggccgatcaacagtacaaaggaaatagcgaaaagataaggggtgttatagtcggcgaataaaatcatatatcactccaatgtccatttagtgacgcaacatttactttgtaatagtttccttgcttacatttatctgtgttaataataacacaggttagagaagttctggaagagaaagtcttttaatatggttttttatttttcactaaaaagtgtgatcggggacaatatatttacgcacgttatgtttaaaggcactacactgattggggaatactgaaatcagaaaaagcatatggccttaaaaggtatgcgataaccggaggatgtgcttatggatcatagtcttaattctttaaataatttcgatttcctggcgcgtagttttgccagaatgcacgcagaaggtcgcccggtcgatattctggccgttactggtaacatggatgaagaacatagaacctggttttgcgcacgttatgcctggtattgtcaacagatgatgcaggcaagagagctggagttagagcactgatataacgggcctgatggcccgttttagtgtttgtattagatactagttataggtgattttcaggattacgtctttactaaacggtccctcaacaaccgtttctgccgggttcgcactcagttctgccctgaatggtgcggtgaccgaaggcgcactagacgatgaaaaagaagcaaattgtgagaagcggttaaattccgttgctgttccatcgttatgaaatatcttcaatagcagaccattacctatatccagatggctataatcactcaaaatatccgtagtgaaaaaactccctaaaatattaaactgctcagtacaggccgcacccggatctttggtcatgactacgctaaacgtctcactcacgctggtatttttaattgttcgggaatttattttaccaaagtcgacaacgccatcagctggttccagatcaacattaacaaagcagtcaaggacatgaatgttatttaatccgcgaatcctgaaggtcagatttttatctacttctatagcacctgctccgctcatacctttaaattcaagtgctatatattcgtcaggtaatacaagttttttatttactttattggcatttttagctagcttaatatatagctgcactcgtactggaaaagttactgataattgcggttcaggaccgccactacagactgcgggctttttgtagccattcccgaaggttccggctccttttatatcaatacatacaggtgctgcaataggtagtggagatgtagaatcataatcaaccccattataagttacaccgaaagtataagagttttgattataaaagtcttgacctgatgctaacaacatcattatatttgcccatgcagatgggtattcttctcctggagatgggcctggtagtgcattattacagaaaacattcataaaatattcactgctttgccagattttatcaccttttttaccatcgctggggatagagattcttggtacgtaaccaatgacaacggtatttccaccttcatgttcagcatagcagtccattgcccatgcaggtaatgaactaaaacccataaaaaaagtaataacaattaacaagtagcgcatattattgatctcggttggctacagaaatattacaaatgttatttactacagggcagtttatttcataaaaacttaatccaccaaagtcattgatataacccacctgaaaagttgacggaacatttttaaactgcgtatttgcatagctaaaaggggttaccattaagctttgcgtttgtggtaacatcgttaccccatttgttccgatataacccagcgtaacgtgataaggcatcttattgttaaagcggatcgaaccgtcatttctacgaatgatttcaactttttcgtaagtcattaccccatcgtcttctaattcaatggcttttggccgccagaatagtttcaatgcgtgctgcatagtgacttgcatcacattttttttatctgttttgggcggtatttctcgcacgttaaaatagaagagcgtttctctgtctttaggaagttgagcaattttttcctgagttatcattcttatttgaatttgctcactgggatttaaacgcaccataggaggaacagtgacaataaagtcacgcgatttattgcctttcgtatcttctatccatgtttgggccagatagggcaggtttttactttgattagtaagttttaatgcttcgcctttatctgactcattcattatgatacgggtacgatccgggatgatggcaccccaggcaatgctgctcatacaggagagtaatactcctgctgcaatgatattctttgtatttaagtagcgcattagtttcatcctgaattaattttggctaatacacggtaaaatagccgttccggtggttaagttgctgctattgggtggttgaataaaacaagatttgtcaccccagcgtaaagcaagtttgttatcatcctgaatgccgttgaggtatacaaagccgccatcagcaaccagtcctaattctttgtggctggtttcatcttttacgctaatccccagtggtggatgactaccatctgccaggcgaataacccctatgatttggtagcccttgcgggtatcaagtttggcgtagccaatagcaccctcggttaaggtggtggtgataaccgagttttcgatatccacattttctggcagatttcgggtatcaacacttaatgatgttgttatgtaactgctgactgatggaataactccgatgccataccgattagttaccgcgcgtttattgttcaacggaatatcttcagtgccgtctgcgtcgatcataaaacgcgagtcagcactaccgctatagtcgtggaaagcggcaccgtggcgagtcgcagtgaatgaaccattccaactggcattcagagaataataactgtctcgctgtgatgtaccggagaggtagagtcgaccgttctcggtattatgctgataactggcgcgtagtgacgctttcatatctttgaattcatcattgtcgcctgaagcagaaacgctccaggaattatttcgatcggaagagtcataccacgaagcagtatgcgaaatctcattatcctgatttcgttgcataccatagctcaatgttctactagttccccagggaatcgaaatatttaggtacagttgatcctggttgtcttcttcccagtttattcggctaaatgttagagaagtggagacgttttttaatggcccgatatcaaaatcgcggctaagtgataatgaataattcacattactgctggcgtcccagtaagtattacgagccaaacttacgtatgtatttaaccttaatgattcaagatactggttaaacgtgacaatataactctctttttcattctgataattcgtgtaatggttagtgtcattgatatattcattcattgtcacaaagtttttatcagagaaacggtaaccagcgaaagtgagctggctaccggtagattcaaaacgttttgaatagttagcgcggtagctataacccgtttctttatcctgattatgcaactgagcatcagatcgtgtgacatcaaaagataatgaacctaatgagttaaggttaaaaccaacgccggcagccagagattgataatcacggtttgttaaaactgaaccaccatacagggatacattgttcagccaaccccatgagaattcaccagtccagaagaagggttgttgtaaggaatcaccaccaacgctggtcggtttacccatagcagtggtgtagcgaatctgccctttacgcgtcagataaggaatactattagatgcaacttgccattgcgtaacgcgtccgtcctcttcttcaaccttgacgtcaagttgcccctgtaatgtattgaataaattggtaatagcaaatgggcctggaggaacattttcttgataaataatacggttgttctgtgagacagtgacctttgcattcgtttgtgcgacacccgtgatttgcggtgcgtaaccacgtaggtctggcggtaacatattctcatcgcttttcaacgaaatgccagaaaaatggaaagagtcgaaaatagaggattcagtatcgtattgacctatagttagttttgcattcattgctgggattgggcgaaacaaataaatacgcggaaaatccaggttggtcgcctggcttttgccattgttaaatgactgatcgtactggtaatcagtacgcaggcgccaggccccaagattaaccccagcctgcccataggaacttatattttgcgaattatcgccctgatgtggtgcataatgagaggcatataaattgtagtcaagaaatgccccagcaataccatgattccaaagttcaggaggcgtccagtttgcatctttgtattttaaccatgcctgaggtgcagatatggataattgcattttccctttatcgagataagttgtaatttgtttttctttttcgatagggtaacaaccatcgatcaggttttgctgagttttttcaataaattcatcagtaaatcctaataatgttaattgctctggtgtcacgcaaactgcagtttggttatcaattaatacccattggaggtcaaggtggattggcgtcctcttattattaatcagagtgcttagtgaatatttgccgacgggtaattggccatcagtttcaaattgggaaaggttaacgttttcacgatcttcggcttcgattaaatctttgttgaattcaacggcataagctgacgcacaaccaatgatgataacggataatgaacaataaatatttttaatcaattcgcttattgtggttaattttaattttttatacatctgatccacttatcattaatccgttaatgatgtggccgggcgaacccggccaaatgcgattactcgtaagcaatcttgtagtcagcctgagcgtaaacgttgcccggggtggcatctttgcttggggattccatacgagctttgaaattcagttcctgatagctgttggtattgttgaacgtaattactaccggagtacctaaagttacttcgccgctctggctgtccagaatacgtacgccaacgccagtggcgccgccgatttcagtttctttggtatttttcagaagatcagactgacccgtcatggtatttgctgtagtgaaagtaaccttcgcttttgaataagtagttccaccctgactcagcatgcagtcctgcaggtgaatagtgaaaggttcagccaaagatttctgatcgcttttcagtacggtatctgctacttcacccagatttacagttaaatcttcgtcacctggtttaatagaacatggagcagagataacttcacctttaaatttaacaataccgtgaccttcatcagcaaacacgttattggaaagaatcattgctacgccagcaacaagaagtgactttttaaaagcggacataatattcctttatataaagataagtagaaaagagaatgattagtaactgttatttaaggactactaatcattgaaatatgatattttattttgtgttttttataaaattagtttatctaaatatcgattaagtaaaacttaaaaaatacattgcaattatactttcaattgtactcattcatttttgtgatggttttctgaatgggattacgcgataaggtaatagaaagcactataaattagaggattaattcataatttacagtgcattaaagacgaatgtttacagcgttggggggagagtctctggatctggctgctttttgatctcagtactgcgattttccagttcgctgattctttgttcaagcagcgccagtttttcacgagtccgtaacaggacttgcgtttggacgtcgaactcttcacggcttacaaggtcgaggcgcgtcagctgcgcttgtagggtttggcggatttttttctccacatcttccccgaactccctgattcctttaggcattgattcgtgaacctggcgagcgatttgctcaatttttttcgggtcaatcattgtagtttccctgtactgataggtgttgagtgccattgtagtgcgataagggtaagtcataaaccagaattatgtgaagctatgcgttgctgccgctaatcattagcgttatagtgaatccgcttattctcagggcggggcgaaattccccaccggcggtaaatcaactcagttgaaagcccgcgagcgctttgggtgcgaactcaaaggacagcagatccggtgtaattccggggccgacggttagagtccggatgggagagagtaacgattctgtcgggcatggacccgctcacgttattttggctatatgccgccactcctaagactgccctgattctggtaaccataattttagtgaggtttttttaccatgaatcagacgctactttcctcttttggtacgcctttcgaacgtgttgaaaatgcactggctgcgctgcgtgaaggacgcggtgtaatggtgcttgatgatgaagaccgtgaaaacgaaggtgatatgatcttcccggcagaaaccatgactgttgagcagatggcgctgaccattcgccacggtagcggtattgtttgcctgtgcattactgaagatcgccgtaaacaactcgatctgccaatgatggtagaaaataacaccagcgcctatggcaccggttttaccgtgaccattgaagcagctgaaggtgtgactaccggtgtttctgccgctgaccgtattacgaccgttcgcgcagcgattgccgatggcgcaaaaccgtcagatctgaatcgtcctggccacgttttcccacttcgcgctcaggcaggtggtgtactgacgcgtggcggtcatactgaagcaactattgatctgatgacgctggcaggctttaaaccggctggtgtactgtgtgagctgactaatgacgatggcacgatggcgcgtgcaccagagtgtattgagtttgccaataaacacaatatggcgctcgtgactattgaagacctggtggcataccgtcaggcacatgagcgtaaagccagctgaaaaccgctgcttaatttactgccttaatcaagaaaccgaagttgtagcaggcttcggtttttatttttccctgctatgcaagatgttaattccgcttctctttctatgagaaaatttcattaatatcaggcattctttttcattatgatcaaaatcatataattgttccgttattatgcgaccatatgaatatatccgaaaaaggatatgtaaaatttatacgctaaatgtttagtattgttaaatattaagggtaaaaggatgtttatcgcctggtactggattgtattgattgctctggttgtggtgggttatttcctgcatttgaaacgttattgtcgggcgtttcgccaggacagagacgcactgcttgaagcgcggaacaaatacttaaacagtacgagagaagagacagccgaaaaggtagaataaggctttcgtgaagctggcagaagttgtccatgcgctggacaacttctgatgttgtttttaaccaattcccgccgtttgtagcagcactaaactgaatcccatcactgacattccacatagtacgccatagctggggttattattagggtcaatctctttggcgagcggcattaattcatcaaccgagagcgccaccataattcctgcaaccgccgccatgattgccgccatgaccaccggggaaatcatgctaccgaggattaaccacgccagcacaccaccaagaatttctgctagtccagaaatccccgcccacagaatcgcggtgcgtttagaccccgttgccgcataaaccgggcctgccactgccagaccttcagggatattgtgcaacgcgacggccagtgcgatgccaaatcccagctccaggttgctgctcgccgtgacaaaggtggcaatcccttccgggaagttatgcagactgatgccgagagtgagcagaatggctgtgcgcttgatcgattttggcaacggctgcaccgatttttgcattaaatcctgcggatgagcatgtggcaacatgcggtccaggccaaaatagccaagcagaccgaagataaacattccataacccaacacaggcgacattccttcagctgctagtgcggcaggaagcatttccattaatgagatgagcaacatgatccccgccgcaaaacctagcgaaaacgccagtaagcggttcgagggtttttgcccgagaacgccgagaaacgcgccaataaacgtggctgcccccgccagtatggtcagaatgagaggtactgacatcgacaactccttataaatcttcaccttcaggcagatcgtcaaaataactgatgatcatcatcattgttatccgggttcttactccgccgaacaagcgtattgtgaggatatcaaaatgacacctttagttaaggatatcatcatgtcttcaacacgtatgccagcattgtttttaggtcacggtagtccgatgaacgtgctggaagataatttgtatacccgcagctggcagaagttggggatgacattgccacgcccgcaagcgattgtggtggtttcggctcactggtttacccgtggaacaggagtgaccgcgatggagacgccgcccacgattcatgactttggtggcttcccgcaggcgctgtacgatacgcattatcctgctccgggttcgcctgcgctggcacagcgtctggttgagctgttagcgccgatcccggtgacgctggataaagaagcctggggctttgaccacggctcgtggggcgtgctgattaagatgtatcctgacgctgatatcccgatggtgcagttgagtatcgacagtagcaaacctgccgcctggcatttcgaaatggggcgcaaactggcagcgctgcgagatgaaggaataatgttggtcgccagcggtaacgtggtgcataacctgcgcacagtgaagtggcacggtgatagttcaccgtatccgtgggcgacgtcgtttaatgagtatgtgaaagcgaatctgacgtggcaagggccagtggaacaacatcctctggtgaattacctcgaccatgaaggtggcacgttatcgaacccaacgccagagcattatttgccgttgttgtatgtgttaggtgcgtgggatgggcaggagccaattaccattccggttgagggtatagaaatgggcagcctgagtatgctgtcggtgcagataggctaacaattaccggatggcgagtgccatccggtatcgtggcttattcaacaaaaatatgtggataaaaccgagacatatcctgggtgatcaatgcacggtcttcacgaatgccaattccggcgggttgatcgttcaccagccagctaccaatcagcatatagctgtcgccgaatttcggtaacgggtggaattgctgaacaatcatcccttcttcgccatacggaccttccgctgcttcaatggttttgccgttctcaatgatcgacacgtttgcgccttcacgggagaagatcggtttaaccacatatttttccatttgcggatgatcatcttccgcaaaataagcgggcagcaggttcgggtgattcgggaacatctcccacagtagcggtagaagtgccttgttggagataatgctcttccacgccggttccagccagcgtacgcctgcatcctccagcttggttgagaacatctcacgcaacataaattcccacggatacagtttgaacaggttggaaattacctgatcctgtaaatccgtgaactgacctttttcacctaacccgatatcatcgatgtagaggaactcagtagcaatttcagcttccgttgcgcagtcctgcaaatactgaatggttccgcgatcttccaccgtgtcgcgacagcaggtgagatgcagcaactggaagccatactgttcacgcagctcaacgaagcgatcgatcagtttttcttgcagactgttaaactggtcgctgccctccggcaagttaccggcgttaagctgatcttccagccagatccactgaaagaacgccgcctcgtatagtgacgttggcgtatcggcgttattttccagaagtttaggttcaccagtgccatcccacgccagatcaagacgcgaataaagcgatggctggtgcgtcagccatgactggcgcacaaaactccaggtgtgttttggaatgcggaatttggtcatcagctcatcgctggcgatcactttttccaccactttcaggcacatctggtgcagttcggcggtgacttcttccagcttttcaacctgggcgagggtcaacttgtagtaagcatcttcacaccagtacggctcgccgtacatggtgtgaaaattgaaaccgtattcgtgggctttctcacgccagtccgggcgctcggtaatactgactctttccatcggtatcagccacccattgaacgagaagaggtaccggttgcactacgctgcatagtgctttgtttggcaacagattcaccaaaaccgccacgggtaacggtagtggtggtcgccggttttggtgccattgccgtcttcggtacggtcatggtgcggcctggctgggctgcgccatagtttttacccgtcgcgtcggtatatttaccgtaagccggactggctgggtttttcgaggagaacagcggctgctgtgcaaatcccgcgccgccgcccatcagacgccccatcatgtaaccggccatcagcggcatccagaaactcccgctggattgctgggcctgcgcctggttttctggtgccatgccagcctgggctggtgcctgctggcactgaccttcaccaaattcagcaacacagtcttcacgggtggcgtatttcggcgcagtacgttcggcttctttcagcgcattgttgtacgcggtggtacattcggcgcttttgcctgggtttgcagctgaacagtcgtcagcattttgatagagagacactgtttcatcactcttttcacagccagccagcataaaaacagtggcaaccgcgagagcgactggtgtcagatggcgtgcgctccagtttttgcggaacgatgcgtggcgtatggattttgtccgtttcatttttgtcttccgggaccagtggtaaatacccatcagaatagaggatggctggtcgaaattgaagcgagaagggggaagaatgcggcagataacccgtatctttacgttgccttacgttcagacggggccgaagccccgtcgtcgtcatcagttacggaaagggttatgaccgttactggtggtagtgcgtgcggatgtttgctgaacgactggtgccgggctatcaggcgcataaccatcagcaatagcattctgttccggcgtttgcggtgcaacgttttccggattagtggaaaccggtttgctcagcgcattgttcagtgccagcagatcctgctcgttcaacgtacccagagctgacttaatattcagctgattaatcaggtagttataacgcgcattcgccagctcttgcttggcgttgtacaacgtggtggtcgcatccaacacatcaacaatggtacgcgtaccgaccgagtagcccgcttccatcgcgtctaatgagctttgagcggaaactacggcttgtttgtaggcgttaatgctactgatagatgcattaatgttgttgaaggaggaacgcacggtctgcacgacgctacgatgggcactttccagttgctcgctggcaccgacaaagttgtactgtgcctgtttcacctgcgagttaaccattccgccctgataaatcggcagcgagaagctcaggccaactttgttctggcccatattgctatcgtcatactgggtaccagcggcaccacgggttttcgaaccgctataagaggtgtcagaaatcccggtagaagccgttaaatccagagtcggtaagtgaccatcctgcgcctggcgaatttgctcgcgcgccaggtcctggctcaagcgtgcctgtaacagcgacaggttgcgtttttcggcttctttcagcagcgcgttaaccggctgtggtttgtcggttttaaagttttcgacattcagcgcagccagttccggatagtagttaccggtgatctggcgcagctgctctaccgcgttatcaaggttattacgtgcggtcacttcgttcgccagcacggtatcgtactgtgcgcgggcgttctgcacgtcggtgatcgctaccaggcccacgttaaaacgttgggtggtttgatctaattgacggtagatcgcttctttttgtgcctgtgtataggaaagaacgtcaatagcattcaacacgttgaaataagcggtcgcggtgttgaggatcaaggtttgctgatcggtctgatacgtgacgtcctgaatccctgctgctttttcctgcagcgttaacgcacgccatttcgacatatcaaaaatggattgagttaactgcaaggacgcactggtcgcgttagagttgatgccgttcgcgtcgcggtagccgttgctataggtgtaatctgcacctaaacctagctgtggcagtaatggactgcgcgcttcattaattttttcaaaggcagcatcacgatcggcggcagacttacgcaattccgggttactaaggcgtgcttgctgataaacttgcatcaggttctcggcctggctcaacgaactgaacccagaaaggctcaggccgataagaatggggagcaatttcttcatttgcattccttgtggtgaagcagtatttagcgcgatcaaactgtaaaattattgcggattctagcagaagccgctaccgcaaaaggttggcgttacgtgccatagggcgttaatgtgcctcaatttaacacatgactgctcaaacggcagtcaaacgtcgctgaaattcacatttaattcactattagtgccaggacattaacaatgcttaagccagacaacctgcccgttacatttggcaaaaacgatgtagaaattattgcacgagaaacactttatcgcggctttttttcattagatctttatagatttcgtcatcgtctattcaacgggcaaatgagtcatgaggtgcggcgggaaatttttgagcgcggtcacgccgcagtcttgctaccctttgacccagtgcgtgatgaagttgtgctgattgagcagattcggattgccgcgtacgacaccagcgaaaccccttggctactggagatggttgccgggatgattgaagagggtgaaagtgtggaagatgttgcccgtcgcgaagcgattgaagaggcgggactgatagtcaaacggaccaaaccggtgttaagtttcctggcaagcccggggggcaccagtgagcgttcgtcaattatggtgggcgaagtggacgccacgaccgcaagcggtattcacggtctggctgatgaaaacgaagatattcgcgttcatgtggtaagccgggaacaggcataccagtgggtagaagaggggaaaatcgacaacgcagcgtcggtcatcgctttgcaatggctgcagctgcatcatcaagcgttaaaaaatgagtgggcataaatgaagcgttacacacctgactttcctgaaatgatgcgcctgtgcgagatgaacttttcacaattgcgccgtttgttaccgcgcaatgacgcacccggcgaaactgtaagctatcaggtggcaaacgcacaatatcggctgacgattgtggaatcgacccgatacactaccctggtgacaatagaacagactgcgcccgcgatcagttactggagccttccgtcaatgacggtgcgtctgtatcatgacgcgatggtggctgaagtgtgttcaagccagcagatttttcgcttcaaagcgcggtatgattatcctaataaaaagttgcatcaacgcgacgaaaagcatcaaattaatcagtttttagcggactggttgcgatactgtttagcacatggagcgatggcgattccggtttattagcgtcgtgaaacctaaggacaccatttggaaagcctgttaacccttcctctggctggtgaggccagagtcaggattttacaaattaccgacactcacctgtttgcacaaaagcacgaagccctgttaggggtaaacacctgggagagttaccaggcggtgctggaggcgattcggccacaccagcacgaattcgacctgattgtcgcgacaggtgatttagcgcaggatcaatcctctgcggcctatcagcatttcgctgaaggcatcgcaagttttcgtgcgccctgcgtctggctgccgggcaaccacgatttccagcccgcgatgtacagcgcgttacaggatgcgggtatctccccggcgaagcgcgtgtttattggtgagcaatggcaaatcctgttgctggatagccaggtgtttggcgtgccgcacggtgagctgagcgagtttcagcttgagtggctggaacgtaaactggccgatgcgccagaacgccatacgttgctgctgctgcatcatcatccgctacctgcgggttgtagttggctcgatcaacacagtctgcgtaacgcgggcgaactggataccgtgctggcgaagtttccgcacgtcaaatacttgctgtgcggtcatattcatcaggagctggatctcgactggaatggtcgccgcctgctggcaacgccgtcgacctgtgtgcagtttaagccgcactgttccaactttacgctggataccatcgcgcccggctggcgtactctcgagttacatgctgatggcacgctgaccaccgaggtgcatcgcctggcggacacacgtttccaacctgataccgcttcagaaggctactgatgtctacgcttctttatttacacggtttcaacagctcgccgcgctctgcaaaagcgagcttgttaaaaaactggctggcggaacatcaccctgacgttgagatgatcattccgcagttgccgccgtatccttccgacgcggcagagctgctggaatccattgtcctggaacatggcggtgattcgctgggtattgtcggttcgtcactggggggatattacgccacctggttgtcacaatgttttatgctgcccgcagtggtggtaaacccggcggtgcgcccgtttgaactgctgacggactatctcggtcagaacgagaacccctacaccgggcagcaatatgtgctagagtcacgccatatttacgatcttaaagtcatgcagattgacccgctggaagcgccggatttgatctggctgctgcaacagacgggagatgaagtgctggattaccgccaggcggtggcgtactacgcttcctgccgccagactgtcatagaaggcggcaaccacgcattcacgggcttcgaagattatttcaacccgatcgtcgattttcttggtctgcaccatctctgacgatcaactcgaattactaacttaaaccatgacgcaaacttataacgctgatgccattgaggtactcaccgggcttgagccggttcgccgccgtccggggatgtataccgataccactcgccctaaccatttggggcaagaagtcattgataacagtgtggatgaagcactggcgggtcacgcaaaacgcgtggacgttattttacatgctgaccagtcgttagaagttattgacgatgggcgcgggatgccggtggatattcacccggaagagggtgtaccggcggttgaactgattctttgccgtctgcatgcaggcggtaaattctctaacaaaaattaccagttctctggcggcctgcatggcgtggggatttcggtggttaacgccctgtcgaagcgcgtagaagttaacgtgcgccgcgatggtcaggtttataacatcgcctttgaaaatggcgaaaaggtgcaggatttacaggttgtcggcacttgcggtaaacgcaatactggtaccagtgtgcacttctggccggatgaaaccttctttgacagcccgcgattttctgtttcacgcctgacgcatgtgctgaaagccaaagcggtattgtgccctggcgttgagatcacttttaaagatgagatcaacaataccgaacaacgctggtgctatcaggacggtctgaatgattacctggcggaagcggtaaatggtctgccgacgctgccggaaaaaccgtttatcggtaatttcgctggtgatactgaagctgtggactgggcgctactgtggctgccggaaggcggtgaactgctgaccgaaagctacgtcaaccttatcccaacgatgcagggcggtacccatgttaatggtctgcgtcagggcctgttggacgcgatgcgtgagttctgtgaataccgcaatattctgccgcgcggtgtaaagctgtcggcggaagatatctgggatcgctgcgcctatgtgctgtcagtaaaaatgcaggatccgcagtttgccgggcagacgaaagagcgtctctcttcgcgtcaatgcgcggcattcgtttctggcgtggtgaaagatgcctttatcctgtggctgaaccagaacgttcaggcggctgaactgctggcggagatggcgatttccagcgcccagcgccgtatgcgtgcggccaaaaaagtggtgcgtaaaaagctgaccagcggcccggcgttgcctggcaaactggctgattgtaccgcgcaggaccttaaccgtaccgagctgttccttgtggaaggtgactccgcaggcggatctgccaagcaggcgcgcgatcgcgaatatcaggcgatcatgccactgaaaggtaagatccttaacacctgggaagtctcttccgacgaagtgctggcttcgcaggaagtgcacgatatttcggtagcgatcggtatcgatcctgacagcgacgatctgagccagcttcgttatggcaaaatctgtatcctcgcggatgcggactctgatggtctgcacattgccacgctgctctgcgctttgttcgtaaaacatttccgcgcgttggtgaaacacggtcacgtttacgtcgcactgccaccgctctaccgtattgatctcgggaaagaggtttattacgcgctgacggaagaagagaaagagggcgtacttgagcaattaaaacgcaagaaaggcaagccgaacgtccagcgttttaaaggtctgggggaaatgaacccgatgcaattgcgcgaaaccacgcttgatccgaacactcgccgtctggtgcagttgactatcgatgatgaagacgatcagcgtactgacgcgatgatggatatgctgctggcgaagaaacgctcggaagatcgccgcaactggttgcaagagaaaggcgacatggcggagattgaggtttaaaggaaagaacattgcccggtcaggatggccgggcaaacaaggcaggattaaatccctggctgcagaatacggatattcatctccagcacgtcaccttttacggcttcgctatacgccttcatgtgcggggtttgcagatgcgcttcaagatgcgcgatgctttcccactgctcaatcatcacgatagaatccggtgccatagactggaaactcacgccagctgcgcaatccaccattggcgcatagccgtggcaaccttcttctttcagtacggttggaacgattttagcaaactgatccaataccgcctgacggtgatgttgaccaggacgagtacggatttctgcgattacggtaagcatggttaactccttctaaagcctgagctctagttaaccaaaaatttccacaagatgcttgcgatattcttcagtatagcggggaacatcaggcatttttatcacgtcattagcgataaatgtcggcagcggttccataccgaggaattggtttgctttatggaacggcagatacacaccgtcaacgccaacgccgtggaagaactgatctttttcggtgaaggcttccattggtgcgttccaggtcagagaaagcatatattttttgccctgtaccaggccgccggaaccgtattttttcgacggatctttgcgggtacgaccatcgctggcatacagcgtcccgtgaccttcggtgaatacatcatcaatgtattttttcactgtccacggcgcgcccatccaccagcctggcatctgccagatcaccacatcagcccagagaaagttttgtacttccgctttgacatcgtagtcgctgtcggcgcgaacgatgcggacatcatgcccaaggtcgcgcagtgtgccatccgcgacttcggtcagggtgtcgttcagttgaccattggagtgggcgaattttttcgcgccgttgataatcaggatgttgctcattttttaacctcaaggtgagacgtttgccgactatagtacgtcacagagcggtacggtgaaattagcaaaatgtgcaaagtcttttgcgaatttagcaaaagtctgatcttactctgactcaccgatgcaggataaatattttctgaaaatgacaatactgatagccattcctcataattcttactcgcaccggaataatttacacgtttggttcggtttttttggggattgaaaatatggctttgaataagtaaaagatgaaagtatcaacgtgtcatgttgataattataaatggatttttatgagcgtactgatatatgttaaagcagaaaattaaaacaatatttgaagcattgctatatataatgcttacttattggttaatagattctttttttgctttcaataagtatgactggatgcttgagtcgggaggaaatatttgcagtataccttccgtttcaggcgaagatcgtatattgcaagcaatgattgcagcattttttcttcttacgccacttattattcttatcttaagaaaactctttatgcgggaaatgttcgagttttgggtatatgtattctcgctcggtatttgtctggtttgtggttggtggcttttttggggacggtttatattttgctattagtaaaatctatgagagtcgttttaacggctctcatagacagagaagttaccagcttaccttcgcctcaaatccaccttgttccgcattcccaaattcaacattcatgccatgcaatttggcgattcgctggacaatcgatagcccaagcccgctgccggtagcggtttgtccgggtgggcgatagaagcgttcgccaattcgcgccagtgcctctggtgtcacaccggggccgttatccctcacgatgaaattatcagcattcagcgtgacgtctaccacgctgccctgtggactgtagcgcacggcgttatccagcaaatttcgcaccaacaaacttagcaatagcggttgcccggtgcgtttgatgctgtgggcattgagtgtcagtcgcacgtcaattttcgcctgctgcgccgtgtggtaaatatccatcaccgacgattgcaggagatcttcaagcgggatctccgcgacgtcctgaaggttatccagtgagtccagccgcgatagcgtgagcagttgatcaaccagacgagtagcgcgatcgatcccggaatgtaattggagcagtgcttttttccgcgcctgcggatcatcgtcagagagctgcgcaacttcggtttgcactttcagcgccgttaacgggctacgaagttcgtgagctgcgtcggaggtaaagcgtcgttcacgaaccatcatcgcatgtgtgcgggcgaacagttgatttagcgactcaaccagtggccgcacttcgctgggtacgccagtcgcgtttagtggtttttccgagtcagggtcacgcatacgtagtgccagcgccagtttgttcagcggcgcgagttcacgacccagtagtaccatcatgatgattaacataatcggcagtgcgaccagccacgggatcaattgcccggcaacaatcgccagcgccatgtcttcacggtattcccattcctggccaacaacgatgcgatatttgccatcaggtgaggtcatccagacaaaacgccaaggatcgtcttcaccgaccagttgcccgtcagcaaaaccttcccgttgatagctatagggaatatcttctccgttatcgccatcattaaggaccattctgccgtcgtgggtaaagatggcaaaggtcagcgcatcgtcatcaacatgaccgtgttttaatctatttggcgtctgtgccatgcgatccgccgcgttgatttcgttgagatcgagcgtacttaaccgcttggcaaacagcatcagttgggtgtcgaacaattcatcgacgttatccgttgtttgtttccaggcgacaaagctggaaagcagccaggtcaccgaggccagaattaaaaagattagcgtcagcctgacgcgcagactaagacgttgggtaaatttcatttctcacctaatgtgtaaccaataccatgcacggtacgaataaaatcactaccgagtttgcgtcgcagatgatgcacatgcacttcaacggcattactggtgacctcttcgtcccaggtatacagtttctcttcaatcagtttgcgcggcagtacccgaccagcgttacgcatcagtaattccagcagggcaaattcttttggtttcagtgttaagggttcgccagccagcgtggcgatacgtttgccggggtcgagcatgacgttaccgtggcgcagctcgttgctggcctggccgttggttcggcgcatcagagcttccagcctggcggcgacttctatcaacgcaaaaggtttacacagataatcgtcagctcccagacgcagcccttctacacgttccgccagcgcatcgcgcgcggtcaggatcagtaccggctcacgctgacctttttctcgccattcgcgcaaaatatcgcgaccatccatgcctggtaaggttaaatccaggatcaccgcatcataaggtgcgctataaagcgcctcttttccctgacgaccttgtgtaaaccagtcgacgctaaaacccattttactaaggcccgttttgatgccgtcgccaatcagcatgtcatcttctatcagtaaaattcgcattttttcatccctgcgataaccgtatttgctgccagtaaaccgtgttgtaacgcgctctgtacagcactaaattttatttttttcccttaagaagttgttaaggactatcttgttaaatgctcggaaacagacattaaagggagtaataaacatgaaaaaattcgcagcagtaatcgcagtaatggccctgtgcagcgcaccggtgatggcagcagagcagggcggtttttctggcccatcggcaacgcaaagtcaggccggaggattccaggggccgaacggcagcgtaacgactgtagaaagcgcaaaatccctgcgtgacgacacctgggtaaccctgcgcggcaatatcgttgaacgcatctctgacgatctctacgtgttcaaagatgccagcggtactatcaatgttgatatcgaccacaaacgctggaacggcgtgacggtgacgccgaaagatacggttgagattcagggtgaagtcgataaagactggaattctgttgaaattgacgtcaaacagatccgcaaagtaaatccgtaattgttaccgctcccgggacgcgttcccgggaataatttcgcagggaggcaaaatgacaaacctgacactggatgtaaacattatcgatttcccatcaatacctgtggcgatgttgccgcaccgctgtagccctgaattgctcaactacagcgtggcgaaatttatcatgtggcgtaaagagacggggctttctcctgttaaccaaagccagacttttggcgtcgcctgggacgaccctgccaccaccgcaccggaagcgtttcgctttgatatctgcggcagcgttagcgaaccgattcccgataatcgttatggtgtgagcaatggtgaacttaccggtggacgttatgccgtggcccgccacgttggcgagctggacgatatttcacacacggtatggggcatcattcgccactggctgcctgcaagcggcgagaaaatgcgtaaagcaccgattctgtttcactacaccaatcttgccgaaggggtgacagagcagcgactggaaacggatgtttatgtgccgttggcgtgatgcctgactccagcttcccttataaattcctgcttcaaactggcgctactaatgcgccactttcttatatggtcaatcactttccttaaagaatacgttttgtgtggtcactatctccgtacatctaactaaccttttaggtgctttttcattgctgtaattaaccttttaggttataactaaagtaacagggaggcgggggttatggaaaaacgcacaccacatacacgtttgagtcaggttaaaaaacttgtcaatgccgggcaagttcgtacaacacgtagtgccctgttaaatgcagatgagttaggtttggattttgatggtatgtgtaatgttatcattggattatcagagagcgacttttataaaagcatgaccacctactctgatcatactatctggcaggatgtttacagacccaggcttgttacaggccaggtttatcttaaaattacggtaattcatgacgtactgatcgtctcgtttaaggagaagtaatatgaaatgtccggtttgccaccagggagaaatggtttctggcattaaagatattccatacaccttccgtggacgaaaaacagtattgaaaggtatccacggtttatattgtgtccattgcgaagagagcatcatgaataaagaagagtcagatgctttcatggcgcaagtaaaggcatttcgggcttcggtgaatgccgaaacagtggcacctgaatttatagtgaaggttcgaaaaaagctctctcttacccaaaaagaggcaagcgaaatttttgggggaggtgtaaatgcgttttcgcgttacgaaaaaggcaatgcccaacctcatccttccacaatcaaacttttacgtgttctggataagcatccagaactattgaatgaaatccgttaattaatggaaaagcgggggcaactcgcttttttctttaccggagtgtgagccaaatcactcgcgataagtttgagcgaacaatgccacaggcgtattgttgttgggcttataatttctccggtaaggaataccatgtatacgcgaaatttattatggctggtcagcctggtaagtgcggctcctctctacgctgctgacgttcccgccaacacaccgctcgccccgcaacaagtctttcgttacaacaatcatagcgacccaggtacgctcgacccgcaaaaggtggaggagaatactgccgcgcagattgtgctggatctgtttgaaggtctggtatggatggacggtgaaggccaggtgcagcccgctcaggctgaacgctgggagatactggacggcggcaagcgctatattttccatctgcgtagcggtttgcagtggtccgacggtcagcctctgacggcagaggattttgtcctcggctggcagcgcgcggttgacccgaaaacggcaagcccttttgctggctatctggcacaggcgcacattaacaatgccgcagctattgttgcgggtaaagcagatgttacatcgctgggtgtcaaagcgacggatgatcgtactcttgaagttacgcttgagcagccggttccttggttcacgacgatgctcgcctggccgacgctgttcccggttcctcatcatgtcatcgctaaacatggcgatagctggagtaagccagagaacatggtttacaacggtgcctttgtgcttgatcagtgggtagttaacgaaaagattactgcacgcaaaaatccaaagtaccgcgatgcgcaacatacagtattgcaacaggttgagtatctggcgctagataattcggtcaccggctataaccgctatcgcgcgggagaggtcgatctcacctgggttccggcgcagcaaattcccgccattgaaaaatcactgcctggcgagctacgaattattccgcgtctgaacagcgaatattacaacttcaaccttgagaaaccgccatttaacgatgtgcgagtgcgtcgggcgctatatcttacggttgatcgacagcttattgcgcaaaaggtactggggttgagaacgcccgcaaccacgctgacgccgccagaggtaaaaggctttagcgcgacgacgttcgatgaactgcaaaagccaatgagtgagcgcgtcgcgatggcaaaagccttgctgaaacaggcgggatacgacgcctctcatccgctacgctttgagctgttctacaacaagtacgatctgcatgaaaagaccgcgatagcgttgtcttccgaatggaaaaaatggctgggtgcacaggtgacgctgcgcacaatggagtggaaaacctatcttgatgcccgacgagccggtgatttcatgctgtctcggcagtcgtgggatgcgacgtacaatgatgcttccagcttcctgaacacgctcaaaagcgatagtgaagaaaacgtcggtcactggaaaaatgcgcagtatgacgccttactaaaccaggccacgcagatcactgatgcgacaaagcgtaatgcgttgtatcagcaggcagaagtgatcatcaaccaacaggcaccgctgattcctatctactatcagccgttaatcaaactgcttaaaccctacgttggcggttttccgctgcataatccccaggattatgtctacagcaaagagttgtatatcaaggcacattgatgcctttatcgccgtcggagcacgtccggcggcgctattcacgctgatctcctgtgactcgacgcggcagataatgtagtatctccggcaatattgcccctttgaaggctggcgaataagttgaggaatcagaattaatgagcgatatggcagagcgccttgcgctacatgaatttacggaaaacgcctacttaaactactccatgtacgtgatcatggaccgtgcgttgccgtttattggtgatggtctgaaacctgttcagcgccgcattgtgtatgcgatgtctgaactgggcctgaatgccagcgccaaatttaaaaaatcggcccgtaccgtcggtgacgtactgggtaaataccatccgcacggcgatagcgcctgttatgaagcgatggtcctgatggcgcaaccgttctcttaccgttatccgctggttgatggtcaggggaactggggcgcgccggacgatccgaaatcgttcgcggcaatgcgttacaccgaatcccggttgtcgaaatattccgagctgctattgagcgagctggggcaggggacggctgactgggtgccaaacttcgacggcactttgcaggagccgaaaatgctacctgcccgtctgccaaacattttgcttaacggcaccaccggtattgccgtcggcatggcgaccgatattccaccgcataacctgcgtgaagtggctcaggcggcaatcgcattaatcgaccagccgaaaaccacgctcgatcagctgctggatatcgtgcaggggccggattatccgactgaagcggaaattatcacttcgcgcgccgagatccgtaaaatctacgagaacggacgtggttcagtgcgtatgcgcgcggtgtggaagaaagaagatggcgcggtggttatcagcgcattgccgcatcaggtttcaggtgcgcgcgtactggagcaaattgctgcgcaaatgcgcaacaaaaagctgccgatggttgacgatctgcgcgatgaatctgaccacgagaacccgacccgcctggtgattgtgccgcgttccaaccgcgtggatatggatcaggtgatgaaccacctcttcgctaccaccgatctggaaaagagctatcgtattaaccttaatatgatcggtctggatggtcgtccggcggtgaaaaacctgctggaaatcctctccgaatggctggtgttccgccgcgataccgtgcgccgccgactgaactatcgtctggagaaagtcctcaagcgcctgcatatcctcgaaggtttgctggtggcgtttctcaatatcgacgaagtgattgagatcattcgtaatgaagatgaaccgaaaccggcgctgatgtcgcggtttggccttacggaaacccaggcggaagcgatcctcgaactgaaactgcgtcatcttgccaaactggaagagatgaagattcgcggtgagcagagtgaactggaaaaagagcgcgaccagttgcagggcattttggcttccgagcgtaaaatgaataacctgctgaagaaagaactgcaggcagacgcgcaagcctacggtgacgatcgtcgttcgccgttgcaggaacgcgaagaagcgaaagcgatgagcgagcacgacatgctgccgtctgaacctgtcaccattgtgctgtcgcagatgggctgggtacgcagcgctaaaggccatgatatcgacgcgccgggcctgaattataaagcgggtgatagcttcaaagcggcggtgaaaggtaagagcaaccaaccggtagtgtttgttgattccaccggtcgtagctatgccattgacccgattacgctgccgtcggcgcgtggtcagggcgagccgctcaccggcaaattaacgttgccgcctggggcgaccgttgaccatatgctgatggaaagcgacgatcagaaactgctgatggcttccgatgcgggttacggtttcgtctgcacctttaacgatctggtggcgcgtaaccgtgcaggtaaggctttgatcaccttaccggaaaatgcccatgttatgccgccggtggtgattgaagatgcttccgatatgctgctggcaatcactcaggcaggccgtatgttgatgttcccggtaagtgatctgccgcagctgtcgaagggcaaaggcaacaagattatcaacattccatcggcagaagccgcgcgtggagaagatggtctggcgcaattgtacgttctgccgccgcaaagcacgctgaccattcatgttgggaaacgcaaaattaaactgcgcccggaagagttacagaaagtcactggcgaacgtggacgccgcggtacgttgatgcgcggtttgcagcgtatcgatcgtgttgagatcgactctcctcgccgtgccagcagcggtgatagcgaagagtaatatgccggggagggcgctgtttcctcccgcttgcaaggaacgccggatgaaacgttaagtcgtcatccggcagcgtattcaacccccggaaacgataaaaattcccttgaaaccgttgtttattcatgcgttgcgattaacaatacgcttttccagagagcggcttttaacaatgccctaacctgatttcaggtgacgtacaatgccagtctctcagaccttcagagggtgttatgctatatatctttcgtcttattattaccgtgatttacagcatcttagtctgtgtattcggctccatttactgccttttcagcccgcgtaacccgaaacatgtggccacctttgggcatatgtttggccgtcttgcgccgctgtttggcctgaaagttgagtgccgtaaacctacagacgctgaaagctacggcaatgctatctatatcgctaaccaccagaacaactatgacatggtgacagcatcgaacatcgtgcaaccgccgacggtgacggtaggtaaaaagagcttgctgtggatccccttcttcgggcagttgtactggttaaccggcaacttattgatcgacagaaacaatcgcactaaagctcacggcaccattgcggaagtagtgaatcacttcaaaaaacgccgtatttccatctggatgttcccggaaggaacccgcagccgtggtcgcggcctgctaccgttcaagactggagcatttcacgcggcaattgcggcgggcgtcccgattattcccgtgtgcgtctctacaacttcgaataagattaatcttaatcgactgcacaacggtctggtgattgtcgaaatgctgccgccaattgacgtcagtcagtatggcaaagatcaggttcgtgagctggctgcccattgtcgttcgataatggaacaaaaaatcgccgagctcgataaagaagtcgcagaacgcgaagccgccggaaaagtttaagtcggcaatctgtatttttgcggggaacactttcctgcacggtattactttagccagttttacatggagcaaatatgtcactcagtcggcgtcagttcattcaggcatcggggattgcactttgtgcaggcgctgttcccctgaaggccagcgcagccgggcaacagcaaccgctacccgttccgccgctacttgaatctcgccgtgggcaaccgctgtttatgactgtacaacgtgcgcactggtcatttacgccagggacacgcgcgtcggtctggggaatcaatggtcgttacctggggccgactatccgcgtctggaagggcgacgatgttaagcttatttacagcaaccgcctgacagaaaatgtctcaatgacggtggccgggctacaggtaccaggcccgctgatgggcggtccggcacggatgatgtcgccaaacgctgactgggcacccgtactgcccattcgccagaacgcagctactctgtggtatcacgccaatactcccaaccgcacggctcagcaggtctataacggccttgccggaatgtggctggtggaagatgaagtcagcaagtcgctgcctatccccaaccattatggtgtggatgattttccggtcattatccaggataaacggctggataactttggtacgccagaatacaacgaaccgggaagcggcggctttgttggtgatacgctgctggttaacggtgtacaaagcccgtacgttgaagtctcgcgtggctgggtgcgcttgcgactgctgaacgcgtcgaactctcgtcgctatcaactacagatgaacgatggtcgcccgttacatgtgatttctggcgatcagggattcctgcctgctcctgtatcggtgaagcaactttcgctggcaccgggcgagcgccgcgagattctggtggatatgagcaacggcgatgaagtgtcgatcacctgtggcgaagcggcgagcattgttgatcgtattcgtggcttctttgagccatccagtattctggtttctaccctggtgctaacgctgcgcccaaccggccttctgccgctggtcacagacagtcttccgatgcgcttgctgccaactgaaatcatggctggttcgccaattcgcagtcgcgatatcagtctgggtgatgacccgggtattaatggacagctgtgggacgtcaaccgtattgatgtcaccgcgcagcaaggaacgtgggaacgctggacggtacgcgcggacgagccgcaagcgttccatattgaaggcgtaatgttccagatccgtaacgtgaatggcgcgatgccgttcccggaagacagaggctggaaagataccgtttgggttgacggacaagtggagctgcttgtttatttcggtcagccttcctgggcgcacttcccgttctacttcaacagtcagacgctggaaatggcggaccgtggctcgattgggcaactgttggtcaatccggtaccgtaatcttcatactcgcccgaggagggcgagtatggaatacctttcgatttctctttcgttccggcttataatccccggcctttgattatttttttatcatttctggaagcaaaatgagctctatctccctgatccaaccggatcgcgacctgttctcctggccgcagtactgggccgcctgttttggaccggcaccgtttttgccgatgtctcgtgaagagatggatcaacttggctgggatagctgcgacatcattttggttactggcgacgcgtatgtcgatcacccaagcttcgggatggcgatttgcggtcgtatgctggaagcgcagggctttcgcgtcgggatcatcgcccagccggactggagcagcaaagacgactttatgcgtctgggtaaaccgaatctgtttttcggtgttactgctggcaacatggattcgatgatcaaccgttataccgccgatcgccgtttacgtcatgacgatgcctacacgccggataacgtcgcgggtaagcgcccggatcgcgccacactggtttatacccagcgttgtaaagaggcgtggaaagatgtaccggtgatcctcggcggtattgaggctagtctgcgccgtaccgcgcattatgattactggtccgataccgtgcgccgttccgtgctggtggattcgaaagccgacatgctgatgtttggtaacggtgagcgtccgctggtggaagtggcgcatcgtctggcgatgggcgagccaattagtgaaatccgcgatgtgcgtaataccgcgattatcgtgaaagaggcgctgcctggctggagcggcgtggattccacccgtcttgatacccctggaaaaatcgacccaatcccgcatccgtatggtgaagatttgccgtgcgcggataacaaaccggtggcaccgaaaaagcaggaagccaaagccgtaaccgtgcagccaccgcgcccgaaaccgtgggaaaaaacctacgtgttgctgccttctttcgagaaagtgaagggcgataaagtgctgtacgcccatgcttcgcgtattctgcaccacgaaaccaacccaggctgtgcccgcgcattgatgcaaaaacacggcgaccgctatgtgtggatcaacccgcctgctattccgctttctaccgaagagatggacagcgtttttgcgctgccatacaagcgcgtgccacatccggcctatggcaatgcccgtattccggcttacgaaatgatccgtttttcggtcaacattatgcgtggctgctttggcggctgctctttctgttctatcaccgagcacgaagggcgcattattcagagccgttccgaagattcgatcattaatgagatcgaagcgatccgcgacaccgttccaggttttacgggcgtgatttccgatcttggtgggccaactgccaacatgtatatgttgcgctgcaaatcgccacgcgctgaacaaacttgtcgccgtttgtcgtgcgtttatccggatatttgtccgcacatggacacgaaccacgaaccaacgatcaacctctatcgccgtgcgcgtgatctgaaaggcattaaaaagatcctgattgcctctggtgtgcgttatgacatagccgtagaagatccgcgctatatcaaagaactggcgacccatcacgtcggcggttatctgaagattgccccggaacataccgaagaagggccgttatcgaagatgatgaagccgggcatgggcagctatgaccgctttaaagagctgttcgatacttactcaaaacaggcaggtaaagagcagtatctgatcccctatttcatctccgcgcaccccggtacgcgtgatgaagatatggtgaatctggcgctgtggctgaaaaagcaccgcttccgcctcgaccaggtgcagaacttctatccgtcgccgctggcgaactcaaccaccatgtattacaccgggaaaaacccgctggcgaagattggttataagagcgaagacgtcttcgtaccgaagggcgacaaacagcgtcgtttgcataaagcgttgttgcgttaccacgatccggcaaactggccgttaatccgccaggcgctggaagcgatgggcaaaaagcatctgattggcagccgtcgcgattgcttagtgcctgcgccaaccattgaagagatgcgtgaagctcgtcgccagaaccgcaatacccgtccggcgttgacgaaacatacgccgatggcgacccagcgtcagacgcctgctacggcaaaaaaagcgtcgtctacgcaatctcgtccggtgaatgctggtgcgaagaaacggcctaaagcggcggttggacgttaaaaaatatccccggcaactgacacgctaccggggatttttttatcattctgcgtacatacgcaagcagcgcaggcaatcaaaatagtcctgagcatcaagacgcgtattggctctgttagcttcggatttggcagcatagatttgtgggcgtagtgctttcatatcctgctcaagccgggcgattttggcatttaatgtttgcacattgctcgccagctgattgaccttttgctcattgacgcagccactgagcaagcaggttgccagaacaacagctcccacggtgaaaatcgttttcatatagtgttcccttttatttattgttccggctaattgttatttaattcagctcattgctttaatctggcggcagtttttgcctcaatctgcttaagtaggctgccgctgttcgggcggataaaatcagcgatttcccacttgccttcgcgccgctgtaaaaccagttcttgctcttcgttgttgccattggtcagcgtaaaacgaacatgaatgcgggcggaatcggcggttttctccaggactcgaatttcatcaacgcgtgaaaatagcgactcttcgccaaaacagatcggattgtcgtaaataaattgccgttctatttgcatatcttcatcgggattattggccgtcttgaaggtggttttatagaaggcattaaccgcctggcggtaagagtcggaaaccacccacgtccacggccagctataatcagcaatatgttcaaagagttcggcaacaaaggcttccggctgttctttttgcaacgaagctaaagcggccagcgttttttcattctcgctattaactgcttgtaagacgctgccatgattgctgacaatatcgtcaatgacccaacgaccattttccgccaccattttcagtgtctgcgtggtcttttctttatcatctttaaagatacgaaagcgcacaacggcatcggcatgatcggcgtcagtttgggttatcgcaacgctttctagcaccagatcgccaaaatcctgacaatcacaaaccggatcataatccagccagccaatattgcccggcagcgtaagattgtcgttcagggtaagcgcctgttgaatacgcgcagaagttatcgcccgctctccggtttcaccaaaataaggggcagtggcatctgatttatagttctgataaatatgccggactgtttgttctacggtctgtgaggggggctgtgcgtgtacggtaaaacttgccagggctgctaaaaacagaagtattattttcatctgtttttcacctctccgttgcgtttatcccggatatagatgagttgttcttttaagagcttccggctctgcatgatgatgtccttatatttggcattcctgaacaaggaagagtaacaacgggcgggacgcgaggggaataaatgatttctgaaaagtccggtagcggaacattaccgccaccgggagaatttgcatgttagccgccgaactggtcaggatcgggaccgagacgcttgccctgatcgagttttgcaatttcgccgagttcgtctttgtcgagacggaaatcccagacatcaaagttttcggcaatacgtgaaggtgtgaccgatttcgggatcaccaccaggccgctatccagatgccagcggataacaatctgcgccggggttttgccgtatttatctgccagatcgcgaatgactttctgatcgaaaacgcctttccctccttgcgctaatgggctccaggattcggtctggattttgtgtgtcgcgttccaggcgtgtagctggcgttgttgcatcagcggatgaagttcgatctggtttatcacaggcgtcacgccagtttcatcaatcaggcgttgcaggtgatggatctggaagttgcacacgccgatgcttttgattaatccctctttttgcaattcgatcatgcctttccatgcttcgacataatggtcgatagcgggaacgggccagtgcattaagtagaggtcgatataatcaagctggagttttttcaggctgtcgagcagggcttcgcgggggcgcttgtggtcgtcgttccacagcttagtggtgatgaacagttcttctctgttgactgaggcatttttcagggctttgccgacaccttcttcgttcttgtaggccgcggcggtatcaatcgagcgataacccacttctaacgctttttgaatggcggtgattacttcctcattacttgcttgccagacgcccagtcccagctggggcatgacattgccatcctgtagcttaataacggttggattagccatacgttcctcctttatatgaactcaccggagcaggctccggtgaggtgttgtgaacttaagtctggacgaaatgcccgaaaacgaaagtttgaggcgtaaaaagcttagcgggcggcttcgtatatacggcggctgacatccaacgtaatgtcatgattttcgcccagttgggtcatgccgtgctcttccagttttttcagcaaagccgggatggagctgccgtccagaccgtagtcggagaggtgggtcggcacgcctaattgctcaaagaaattgcgggttgcggcaatcgcggcgtcaatacgctcatcatcggaaccttcagtgatgttccagacgcgttcagcatattgcagcagcttagcgcgcttggtatcgcgtttttcattccacagtgcaggcaggacgatagccagtgtttgcgcgtgatccagaccgtgcatcgcagtcagttcgtggcccagcatatgcgttgcccagtcctgcggtacgccagcgccaatcaaaccgttcagcgcctgagtcgccgcccacatgacgttggcgcgcacatcgtagttttctggctctttcagggctttcggaccatcttcgattagcgtcagcaaaatgccttctgcgaaacggtcctgaattttggcatcaaccggtttggtaacatactgttccacggtgtgtacaaaggcgtccactacgccgttagccacctgacgcggcggcagggtgtaggtataaaccggatcgagcacggcaaataccggctgaacatgggcagaatggaacgcctgcttgtcgcctgtggttttacgggagatcaccgcgcctgcgttggattctgaaccggttgctggcagcgtcagcacacagcccatcgggatggcgcttttaatctctttaccgcccgtttgcagaatgtgccacggatcgatattttccggatagttagccgctgcggcgataaatttggtgccgtccagtacagaaccgccgccaaccgccagcaggaaagtcactttctgttcgcgaaccagtttcacggcgttcatcagcgtttcataagccgggtttggctcaataccgccaaattccagcacgtccatgcctttcagggcatccagaacttgatcgagaacgccggtttttttcacgctgccgccgccgtaggtaatcaatacgcgagcatcgtgaggaatttgttcgcgtaaaccagcgattgcgcctttaccaaacagaatgcgggttggggtgtgcagattaaagttgttcattacttgctccctttgctgggccaatatgagggcagagaacgatctgcctgatgtttttcattgtgatcgccagcgccctggctctcaatgctcatttctgccaatgtcttgcctatttctccagagtgctggagaaatgctacaaaattgcgcacaatcaaattgccgcattattcctaagaaattacgcgatatgaaacgtgaagagatttgccgcttgctggcggataaagttaataaactgaaaaataaagaaaatagtttgtcagaactgttgcccgatgtgcgtttgttgtatggcgagacgcctttcgcacgtacaccggtgatgtacgagcctggcatcataattctcttttccgggcataaaatcggttatatcaatgaacgcgtgtttcgttatgatgccaatgaatacctgctgctgacggtgccgttgccgtttgagtgcgaaacctatgccacgtcagaggtgccgctggcagggttgcgtctcaatgtcgatattttgcagttacaggaactgttgatggacattggcgaagatgagcatttccagccgtcgatggcagccagcgggattaactccgccactttatcagaagagattttatgcgcggcggagcggttactcgacgtgatggagcgaccactggatgcgcgtattctcggcaaacagatcatccgcgaaattctgtactacgtgctgaccggaccttgcggcggcgcgttactggcgctggtcagtcgccagactcacttcagtctgattagccgcgtgctgaaacggattgagaataaatacaccgaaaacctgagcgtcgagcaactggcggcagaagccaacatgagcgtatcggcgttccaccataattttaagtctgtcaccagtacctcgccgttgcagtatttgaagaattaccgtctgcataaggcgcggatgatgatcatccatgacggcatgaaggccagcgcagcagcgatgcgcgtcggctatgaaagcgcatcgcaatttagccgtgagtttaaacgttacttcggtgtgacgccgggggaagatgcggcaagaatgcgggcgatgcaggggaattaaatacgttcccggtacagcaaccgggaacggggaaaatcgtcaggcgttacagtatttttttttaatcaccacaaacagcgtgcctaacaagccagcggttaacaaggcaattggcaggatcatcaggaacgtcattacctgatcttcatggcgtttaacgaacggaatcatacttaaggcatagccaaaactggttaccacgctgacccacagcaatccacttaaccagttgaaaaactggaagcggcggtttggcagaccggaaattcccgccatggttggcagcagcgtacggacaaatgcaagaaaacgtccagccagcagcgccagcagaccgtggcggtcaaacatgcaggtggcgcgctggtgatatttagcaggaagctgtgccagccagcctttcaccgttttggtattccctaaccagcgcccctgaatataacttagccagcagcccagacttgctgcggcggtcagaatcgcaatcgtaggcagaaaatccataaccccctgggcaatcaatgcgcctgccagtatcaacaagctgtcgcctggcaaaaatgaggcgggcagcaggccgttttctaaaaacagcgtggcaaacatgacaaagtaaacaacgctaacaatatgaggatccgccagcgcggcaaagtcgtgttgccagagcgcagcgatgatatcttgaataacagccatggactttcctgtggaacagcgtttaagcctttatctgcctattgtactcctgaatcgtccgggacgccttgatcccggacgcaacaatttaagacttttcacaataaaatgtctgcaaaattgtccaaaagtggcaatgttatacaattcgcgcaaaaccggcgtccagatcggcaatcagatcgtcgacatcttccagaccaatatgcaggcgaatcaaggtcccgctaaaatcgatctcgccttgtgggcgaatggcggcgatatgttctggttcatttgccaggatcaacgattcatacccgccccacgagtaggccatgctgaataaactgaagttatccagatagttcgccagctcttcattattgagttttttcttaagcacaaaggaaaatagcccgctgctgcctgtaaagtctcgtttccagaattcgtgacctttactgccaggcagagcagggtggttaactcgcgcaacttgcggatgttctgccagccattcagccactttcagactgctttcatgatgttgacgcaaacgcacacctaatgtgcgcaggccacggctggttatataggcggtatcggcatcgaccatctggcccatcagataggcattttcccgtagctgctcccagcaacgggcattgcacacggcagtgccaatcatcgcatctgaatgcccaaccagatatttggtggcggcttgaatagaaacatcgatgccaaaatccagcgccttaaacagcacaccggctgcccaggtgttgtcgatcataatgatggcatccggcaccacactgcgtacggcggcaacaatcgccggaacgtcgtggacttccatggtgatggagcctggcgattccagaaacacgattttagtgtttggctgcagatgcttaacgatatcggcaccaatcagcggatcaaaccatgatgtcgttacgcccagtttgctgaggattttgctacagaaatcctgactcggttcataggcggtgttggtcatcaacacatgatcgccctgttcgataaaagcaagaatggaattagcaaccgctgccgccccgcagggaaatagcacgcagcctgcgccaccttccagttcacacatcgcttgttgtaaggagaaatgggttaacgttccgcgccgtccatagaacaactctccattggcgcgattacgtgtcgcgtgttttttggcttctacactgtcaaagaccagcgaagaagcgcgctgaatcacgctatttaccgcgccgagagtgtattttttgctgcgtcctgcattcaccagttgagtatcaagctttttgtccgccatgtcgggattcctgtttttatacgtctggatgtctaaactagcatgaatattcgcgggcgcatcctgaagaattggcataaagcagaaaattttcgcaaatggcgtgctggtgacttttttactgcgtaaacgcaaggaaaagaaagcaaaggtacggcagtatgcaaatagtaatgagaacgactatcaattcgacgtcgttttgatattattatgcgcagattttgtgacttgcgtcctggagatacacagtgggtaataatttaatgcagacggacctttccgtctggggtatgtatcagcacgccgatattgtcgttaagtgcgtgatgattgggcttattttggcctccgtagtcacctgggcaatcttcttcagtaagagcgtagagttcttcaatcagaagcgtcgccttaagcgcgagcagcaactgctggctgaagcgcgttccttaaaccaggccaacgatatcgccgctgattttggtagcaaaagcttaagcctgcatttgctcaatgaagcgcagaatgagctggaactgtcagaaggcagcgacgataacgaaggtattaaagaacgtaccagcttccgtctggagcgtcgggtcgccgcagtgggtcgtcaaatgggccgcggtaacggctatctggcaaccatcggcgcgatttctccgttcgttggtctgtttggtacggtctggggcatcatgaacagctttattggtatcgcgcaaacgcagaccactaacctggcagtcgttgcgccgggtatcgcagaagctctgttagcaacggcaatcggcctcgtggcagcgattcctgcggtcgttatctataacgtatttgcacgccagattggcggctttaaagcgatgctgggtgatgttgcagcgcaggtattgttgctgcaaagccgtgacctggatctggaagccagcgccgctgcgcatccggttcgtgtcgcacaaaaattacgcgcaggataatatccgatggcaatgcatcttaacgaaaacctcgacgataacggcgaaatgcatgatatcaacgtgacgccgtttatcgacgtgatgttggttctgctgattatctttatggtggcggcaccgttagcgacggtagatgtgaaggtgaacttgcctgcttctaccagcacgccgcagccgcgcccggaaaaaccggtttatctgtcggtgaaggcagacaactcgatgtttatcggtaacgatccggtcaccgatgaaacaatgattacggcgttgaatgcgttaaccgaaggcaagaaagacaccaccatcttcttccgagcggacaaaaccgtcgattacgagacgttgatgaaggtcatggatacgctgcatcaggcgggttacctgaagataggtctggtcggcgaagaaaccgccaaagcgaagtaaagtagaattgcctgatgcgctacgctcatcaggcctacaaaatctattgcaacatgttgaatcttcgtgcgtttgtaggccggataaggcgttcacgacgcatccggcattaggtgctcaatgcctgatgcgctacgcttatcaggcctacaaaatctattgcaacatgttgaatcttcatgcgtttgtaggcggataaggcgttttcgccacatcaggtaagagtgaattcacaatgatgcccggttgcttttcacaaccgggcatttttttaacctaaatgctcgccgccgcacacgccgtgcacttctgcggtgacgtagctcgactcctgacttgccagataaacatatacaggggccagttccgccggttgccccgcacgtttcatcggcgtttgctgaccaaactgcgggatcttatcctgcgtttgtccgccggaaatttgcagtgctgtccagatcgggcctggcgcgacaatattcacccgaatacctttctccgcgacctgttttgccaagccacggctgtagttcagaatcgccgccttcgtagccgcatagtccagtaaatgcggacttggctggtatgcctggattgacgaagtggtgatgatacttgcacctttcggtagcagggggatcgcttcctgggttagccagaacagcgcgaaaacgttaatggcaaaggtcttttgaaactgttcgctggtgaggtctgcaatatccggaatggcaacctgtttcccggcgaccagcgccataatatccagcccgcctaacgccttgtgcgcttcgtgaaccagcgaacgggcaaatttctcatcgcttaaatcgcctggcagcagaacggctttgcgtccgcattcttcaatgatctttttcacatcctgagcgtcttcttcttccacgggaagataactgatcgccacgtcagccccttcacgcgcgtaagcgatggcggcagcgcgacctattccggaatcgccccctgtcaccagtgctttacgatctttcaggcgaccgctaccaacataggttttctcgccgcaatccggtaccggtgtcatcttcgcctggatgcctggcgtcggttgtttctgtttgggatattcaccagtgtaatactgcgtggtcgggtcttttaaatgagacatcgtttttctcccttcaggttcaacgtcctttaagggtagacgttctcgatgcgttgataagggaaccaggaagatccctaaacctcagaattatgcgacaaaggtttaacgtatatgttgatttgctgttgcgtgctgtttactcaattgcgatatactgttgcccgttttaactacacgacaggaatgtatggaacgttttcttgaaaatgcaatgtatgcttctcgctggctgcttgcccccgtgtactttggcctttcgctggcgttagttgccctggcgctgaagttcttccaggagattattcacgtactgccgaatatcttctcgatggcggaatcagatttgatcctcgtgttgctgtcgctggtggatatgacgctggttggcggtttgctggtgatggtgatgttttccggttatgagaatttcgtctcacagctggatatctccgagaacaaagagaagctgaactggctggggaaaatggacgcaacgtcgctgaaaaacaaagtagcagcgtcgattgtggcaatttcttccattcacttactgcgcgtctttatggatgcgaaaaatgtcccggataacaaactgatgtggtacgtcattatccatctgacgtttgtgctttctgcatttgtgatgggctatcttgaccgactgactcgtcataatcactgatctgattcgggcgcggttcgcgcgcccgttattaacaggtcatttatcggaagacgcctgccacagattcagctcgccatcggcgatatgctgatcaatctgcgccagctccttggtgctaaatgtcagattattcagcgcctgcacgttctcctctagttgctccgcgcggctggcaccaatcaataccgacgtcacgcgatcatctttcagcaaccagcttaacgccatttgcgccattgattgtccacgctgctgtgccatttcattcaataagcgcaggctgttgaggttggcttcggtaagcattttcggtgtcagaccacgaactttattcccttcacgatgcatccgtgaatcttgcggaatgccgttgagatattttccggtcagcaatccctgagccagaggagtaaaggcaatacagcccacgccgttattttgcagggtatccagcaggccgcttttatccacccagcggttcagtaaattgtacgaaggttgatgaattaacagcggaattttccacttgcgcagcaactcgaccattttttgcgtccgctctggcgagtaagaggagatcccgacatacagcgccttaccgctttgtaccgcatgagccagcgcagaggcggtttcttccatcggcgtattttcatcgacgcgatgagagtaaaagatatcgacatactcaagccccatacgcttcaggctttggtcgaggctggcgagcaggtatttacgtgaaccgccagagccgtaagggccgggccacatatcgtagccagccttggtagagataatcagttcatcgcgataagcggcaaaatcctcccgcagcaggcgaccaaagttctcttctgcgcttcctggaggcggcccgtaattgttggctaaatcaaagtgcgtaatgcccaaatcaaacgctttacgcaggatcgcacgctgtgattccagcgcgttaacgtgaccgaaattgtgccataaaccgagcgataacgcgggcaggcgtaaaccactttttccgcaatagcggtattgcatctgcccgtaacgttcgggattcgctaaccagaccatgacctctcctttccaccgttcaatttcgaaacaatgtttctagtttagcgattcgccagcgcgtatcccgtagtctggctcacagagtgacgaaaaactgggcaaaaacacgtgcttatgctttgcttaaaaaaacaccaactgaggagtgcaacgatgccgcgtttaaccgccaaagatttcccacaagagttgctggattactatgactattacgctcacgggaaaatctcgaaacgtgagttcctcaaccttgcggcgaagtgcggtaggcgggatgacggcattagcgttgtttgatttgctcaagccaaattatgcgctggcgactcaggtagagtttaccgacccggaaattgttgctgagtacatcacgtatccttcgccaaatggtcacggcgaggtgcggggttatctggtgaagcccgcaaagatgagcggcaaaacgccagccgtagtggtggtgcatgagaatcgtggactgaatccgtatatcgaagatgtggcacggcgagtggcgaaggcggggtatatcgccctggcacctgacggcttaagttccgttggaggttatccgggaaatgatgataaaggtcgtgagctgcaacagcaggttgatccaacaaactgatgaatgatttctttgccgcaattgagtttatgcaacgctatccgcaagcgacaggcaaagtgggtattaccggattttgctatggcggtggcgtatcgaacgcggcggctgtcgcgtatccggaactggcctgcgcggtgccgttttatggtcgtcaggcacccactgccgatgtggcgaagattgaagcgcctttactactccacttcgcggaactggacacccgaatcaacgagggctggcctgcttacgaggcggcgttgaaagccaataataaggtttatgaggcgtatatctatccgggggttaatcacggattccataatgattccacgccccgttatgacaaatctgccgccgatcttgcctggcaaaggacactgaaatggttcgataaatatctctcctgataggtttatctcttacgggattacgtcttaaacaagcatgaaaaaatagcgtgcgcaaaagtcgttctttgcctaaaatatcgctatatatggcaatatatagcgaatgaggtgaacgatgaataaccattttggtaaaggcttaatggcgggattaaaagcaacgcatgccgacagtgcggttaatgtgacaaaattctgtgccgattataaacgcggttttgtattaggctactcacaccggatgtacgaaaagaccggagatcgccagcttagcgcctgggaagcgggtattctgacgcgccgctatggactggataaagagatggtaatggatttctttcgtgagaataattcctgttctacgttgcgcttttttatggccggttatcgcctcgaaaattgatcaaacatacgtattatcttgctttaattaattacactaatgcttcttcccttcgttttagcgccccgccgcagtatcatgatatcgataaccataataaatgtgtggtaaatggcgcatcgatcgcattattgattttgcgattgaggcaaaatatatgccaggtcttcgcaacggaataactataaatgactggagataacaccctcatccattctcacggcattaaccgtcgtgatttcatgaagctttgtgcagcattagccgccaccatggggttaagtagcaaagccgctgcagagatggtcgaatcggttactaacccgcagcgtccgccagttatctggattggcgcgcaggagtgcaccggttgtacggaatctctgcttcgtgcaacgcatccaacggtagaaaacctcgtactggagactatctctctggagtatcacgaagtgctttccgccgccttcggtcatcaggtcgaagagaacaaacataacgctctcgagaagtacaaagggcagtatgtgttagtggtggatggttccatcccattaaaagataacggtatttattgcatggttgccggtgagccgattgtggatcacatccgcaaagcggcggaaggcgcagcagccattatcgctatcggttcctgctctgcgtggggcggtgttgccgcagctggagttaacccaactggcgcagtcagcctgcaagaagttctgccaggcaaaaccgttatcaatattccgggctgcccgccgaacccgcacaacttcctcgcgaccgttgcgcacatcatcacttacggcaaaccgccgaaactggatgacaaaaaccgtccgaccttcgcctatggccgtctgattcacgaacactgcgaacgtcgcccgcacttcgatgctggtcgttttgccaaagagttcggtgatgaaggccaccgcgaaggctggtgcctgtaccacctcggctgtaaagggccagaaacttacggcaactgctcaacgctgcaattctgcgatgttggcggtgtgtggccggtggcgattggtcacccgtgctatggctgtaacgaagaaggtatcggcttccataaaggcatccatcagcttgccaacgtcgaaaatcaaactccgcgttcacagaaaccggatgttaacgctaaagagggcggcaacgtctctgcaggcgctattggtttgctcggcggtgtggttgggttggttgccggtgtcagcgtgatggcggtgcgtgaactgggtcgtcagcaaaagaaagataacgctgactcacggggagaataaccgtgaacagacgtaattttattaaagcagcctcctgcggggcattgctgacgggcgcgctgccgtctgtcagtcatgcggctgctgaaaaccgcccgccaattccgggatcgctggggatgttgtacgactcgaccttgtgcgtaggctgccaggcttgcgtcaccaagtgtcaggatatcaatttccctgaacgtaacccgcaaggggaacagacctggtcgaacaacgacaaactgtcgccgtataccaataacatcattcaggtgtggaccagcggcacaggggtcaacaaagaccaggaggagaacggctacgcgtacattaagaaacagtgtatgcactgcgtcgatccgaactgtgtctctgtgtgcccggtctctgcactgaaaaaagatccgaaaaccggcattgtccattacgacaaagatgtgtgcaccggctgccgttactgcatggtcgcctgtccgtacaacgtgccgaagtacgactacaacaacccgtttggtgcgctgcataagtgcgagctgtgcaaccagaaaggtgtggaacgtctcgataaaggcggtctacctggctgcgtagaagtgtgcccggcgggcgcggtgattttcggtacgcgtgaagagctgatggcggaggcgaaaaaacgtctggcgctgaagcctggcagcgaataccactatccgcgtcagacgctgaaatctggcgacacttacctgcatacggtgccgaaatattatccgcatctgtacggcgagaaagagggcggcggtactcaggttctggtactgacgggtgtgccttatgaaaatctcgacctgccgaaactggacgatctttctaccggtgcgcgttccgaaaatattcaacacaccctgtataaaggcatgatgctaccactggctgtgctggcgggcttaaccgtgctggttcgtcgcaacaccaaaaacgaccatcacgacggaggagacgatcatgagtcatgatccacaaccgctgggcggcaaaatcatcagtaaaccggtcatgatttttggaccgttaatcgtcatctgtatgctcctgattgtgaagcgtctggtgttcggtctgggctctgtctctgacctgaacggcggcttcccgtggggcgtgtggatcgcgtttgacctgctgattggcaccggctttgcctgtggcggctgggcgctggcgtgggcggtatacgtctttaaccgtgggcaataccatccgctggtgcgtccggcgctgttggcgagtctgtttggttactcactgggtggcttgtcgatcactatcgacgtgggtcgctactggaacctgccgtacttctacattccgggtcacttcaacgtgaactcggtactgttcgagacggcggtctgtatgaccatctatatcggcgtgatggcactggagtttgctccggcactgtttgaacgtctggggtggaaggtgtcgctacagcgactaaacaaggtgatgttcttcatcatcgcgctcggtgcgctgctgccgaccatgcaccagtcttcaatggggtcgctgatgatctcggcgggctacaaggtgcatccgttgtggcagagctatgaaatgttgccgctgttctcgctgctgacggcgttcatcatgggcttctcgattgtcatctttgaaggttcgctggtgcaggcgggtctgcgtggcaacggtccggatgaaaagagtctgtttgttaagctgaccaacaccatcagtgtgttgctggcgattttcatcgtgctgcgctttggcgagcttatctatcgcgacaagctgtcgttagcgtttgccggtgacttctactccgtgatgttctggattgaagtcctgctgatgctcttcccgctggtcgttctgcgtgtggcgaagctgcgtaatgattcccgcatgctgttcctgtcagcactgagcgcactgttaggttgtgcaacctggcgtctgacctattcgctggtggcattcaacccgggcggcggttacgcctacttcccgacctgggaagaactgttgatttctattggttttgtggctattgagatttgcgcttacatcgtactcattcgtctactgccgatacttcctcctttaaaacaaaacgatcataatcgtcatgaggcgagcaaagcatgagccagagaattactattgatccggtaacccgtattgaggggcatttacgcatcgattgcgaaatcgaaaatggcgtcgtttcgaaagcatgggcttccggtaccatgtggcgcggcatggaagagatcgtgaaaaaccgcgatccgcgcgatgcatggatgattgtgcaacgtatctgtggcgtatgtactaccactcacgcgctgtcttccgttcgtgcggcagaaagtgcgctgaatatcgacgttccggttaacgcgcaatacatccgtaacatcattctggctgcgcacaccacgcatgaccatattgttcatttctatcagctttcggcgctggactgggtggacatcacttctgcactgcaagctgacccaaccaaagcctccgaaatgctgaaaggcgtttcgacctggcacctgaacagtccggaagagttcaccaaagttcagaacaagatcaaagatctggttgccagcggtcagttgggtattttcgctaatggctactggggtcatccggcgatgaaactgccgccggaagtgaacctgattgcggtagcgcactacctgcaagcgttggagtgccagcgtgacgctaaccgcgtcgtggcgctgctgggcggtaaaacgccgcacattcagaacctggcggtaggtggtgtcgcgaacccgatcaacctcgacggtttgggcgtgctgaaccttgagcgcctgatgtacatcaagtctttcatcgacaaactgagcgactttgttgagcaggtttataaggttgataccgcagttattgccgcgttctacccggaatggctgacacgcggtaaaggtgcggtgaactacctgagcgtgccggaattcccgaccgacagtaaaaacggcagcttcctgttcccgggcggctacattgagaatgcggatctgtcctcgtatcgtccgatcacttctcattccgatgaatacctgatcaaaggcattcaggaaagcgcgaagcactcctggtataaagacgaagcgccgcaggcaccgtgggaaggcaccaccattccggcttatgatggttggtctgacgacgggaaatattcctgggtgaaatcaccgactttctacggcaaaacggtagaagtggggccactggctaatatgctggtgaaactggcggcaggtcgcgaatctacccagaacaaactgaatgaaatcgttgcgatttatcagaaactgactggcaacacgctggaagtggcacagctgcactccacgctgggccgtattattggtcgtaccgttcactgctgtgaattgcaggatatcctgcaaaaccaatacagtgcactgatcaccaatatcggcaaaggcgatcacaccacctttgtgaagccgaacattccggcaacgggtgaattcaaaggtgttggcttcctcgaagcgccgcgcggtatgctctctcactggatggttattaaagacggtatcatcagcaactaccaggcggttgttccatcaacctggaactctggtccgcgtaacttcaatgatgacgtcggtccttacgagcagtcgctggtgggtacaccggttgccgatccgaataaaccgctggaagtggtgcgtaccattcactcctttgacccgtgcatggcctgtgcggtacacgtagtggatgctgacggcaacgaagtggtttcagtgaaggttctgtaatgcgtattttagtcttaggggtcggcaatattttgctgaccgatgaagccatcggtgtgcggattgtcgaagcgttagagcaacgatacattctgccggattatgttgagatcctcgatggcggcacggcgggaatggagctgcttggcgacatggcaaatcgcgatcatttgattattgcggatgccattgtctcgaaaaagaacgcgccgggaacgatgatgatcctgcgggatgaagaagttccggcgttgtttaccaacaaaatctctccgcatcagcttggcctggccgacgtcttgtcggccctgcgcttcaccggcgagtttccgaaaaagctgaccctggtcggcgtgatcccggaatcgctggagccacacatcggcttaacgccgacggttgaagcaatgattgaacctgcgcttgagcaggttctggctgcgctgcgtgaatctggcgtggaagccatcccacgggaggcgattcatgactgaagagatagcaggtttccagacctccccgaaggcgcaagtacaggcagcgtttgaagaaattgcccggcgttcgatgcacgatctctcttttctgcatccttcaatgccggtgtatgtttctgattttacgctgttcgaaggtcagtggacggggtgtgtgatcaccccgtggatgctgagtgcagttatcttccccggcccggatcaactctggccgctgcgcaaagtgagtgaaaaaattggtctgcaactgccgtatggcactatgacctttaccgttggcgaactggacggtgtttcgcaatatctctcctgttcgctgatgtcgccgctttcgcacagcatgtcgattgaagagggccaacgcctgacggatgactgcgcacgaatgatcctttcgctgccagtcacgaatccggatgtaccacacgcagggcgtcgcgccctgctgtttggtcgcaggagtggcgaaaatgcatgagttgtctctttgccagagcgccgttgaaattatccaacggcaggcggagcagcacgatgttaagcgcgtcaccgccgtgtggctggaaattggcgcgctctcctgcgttgaggagagcgccgtccgttttagttttgaaattgtctgccacggaacggtggcgcaagggtgcgatttacatatcgtctataaacccgcccaggcttggtgctgggattgcagccaggtggtggagattcatcagcacgatgcgcagtgtccgctctgtcacggcgagcggttgcgtgtcgataccggcgattcgctgatcgtcaaaagtattgaagttgaataaccggagttaataatgtgtattggcgttccaggccaggtgctggctgtcggtgaagatattcaccagcttgcgcaggttgaagtatgtggtatcaagcgcgatgtgaatatcgccctgatttgtgaaggtaaccctgccgatctactgggccagtgggtgctggtacacgtcggatttgccatgagcatcatcgacgaagatgaagccaaagccacattagacgcactgcgccaaatggattacgacattaccagcgcgtgatgattagctttcgtaggcctgataagacgcggcagcgtcgcatcaggcattgtgcacgattgccggatgcggcgtgaacgccttatccggcctggatggcttgctgcgacgaacaccaacccttacccctgacgcttatcttccgtattcgtctcgaaatcactggcgtcatggcgctcatgcaactgctcattcagcggtccgttggtgcggttaacaatacgcccacgtttcaccgccggacgttcgcctacttctttcgcccagcgttgtacatgcttataactgcccgcatcaagaaactcagcggcatcatacacaccacctaacaccacgttgccaaaccacggccaaatcgccatatccgcaatggtgtactcatcgcccgcaacaaacttatgctgcgccagttgcttatccagcacgtcgagcagacgtttggcttccatggtaaagcggttgatggcgtactcaatctttaccggtgcgtaatggtaaaagtgaccaaaaccaccgccgaggaacggtgccgcgccctgtaaccagaacagccagttcatcgtttcagtacgctttgccaaatcctgcggcaggaagtagccaaatttctccgccagataaagcaggatcgaaccagattcaaacacgcggatcggcggattatgcgtatgatcgcgcagcgccgggatcttcgagtttgggttcacttcgacaaagccgctggagaattgatcgccatcgccaatacgaatcagccaggcgtcgtactctgcaccagtaacgcccagcgccagcagctcctcaagcataatcgttactttctgaccgttcggcgttcccagcgaataaagttgcaatgggtgtttgccaacgggcagcgttttttcatgcgtcggaccagaaaccgggcgattgatattggcgaacgcgccgccagcggatttatcccacgtccagactttcgcgggctgataagtattgtctgtcatagtgagttgccttctgagtggtagtgttgaagcagtgtagcaggtcacttgctgtacagaatgtgaattttttaaccctttgcgccagccgctgcgatgaggtgtatgattagtctgacctctgtccggttaatgtcgctgagcaggtaatcagagcacaacaattacgccaactgcttaggttgtattgttaaaggtaaagtgatgagcaaaggaacgaccagccaggatgccccgttcgggacattattgggctacgccccaggtggggtagcaatctactcttcagattacagttctctcgatccgcaggaatacgaagatgacgccgtattccgtagctatatcgacgacgaatatatgggccacaagtggcaatgcgttgaatttgctcgccgttttctctttctgaattacggtgtggtctttactgacgtgggtatggcgtgggagattttctcgctgcgcttcctgcgagaagtggttaatgacaacatcctgccattgcaggcatttcctaacggctcgccgcgtgcgccggtcgcgggtgcgcttcttatctgggataaaggcggtgaatttaaagacactggccatgtcgccatcattacccaattgcatggcaacaaagtccgtattgcggaacagaacgtgattcattccccgttgccgcaagggcaacagtggacgcgcgagctggagatggtggtcgaaaacggctgctataccctgaaagacacttttgatgacaccaccattctgggctggatgatccagacggaagatactgaatacagcttaccgcagccggaaattgcaggcgagctgctgaaaatcagcggagcgcgcctggaaaacaaaggccagtttgacggtaaatggctggatgaaaaagatccgctgcaaaacgcctatgtgcaggccaacggtcaggtgatcaatcaggatccttatcattactacaccattaccgagagtgccgagcaggagctaattaaagccaccaacgagctgcacctgatgtatcttcacgcaaccgacaaggtgctgaaagatgacaacctgctggcgctgttcgacatcccgaaaatcctctggccacgtttgcgtctctcctggcagcgtcgccgtcaccatatgatcactggtcgtatggatttctgcatggatgagcgtggcctgaaggtttacgagtacaacgccgactccgcctcctgtcataccgaagcgggcttgatcctcgaacgttgggcggagcagggctataaaggcaacggcttcaatccggcggaagggctgattaacgaattggctggtgcctggaaacacagtcgtgcacgtccgtttgtccatatcatgcaggacaaagatatcgaggaaaactatcacgcgcagtttatggagcaggcgctgcaccaggcgggctttgaaacgcgtatcttgcgtggattggatgaactgggctgggatgctgccgggcaactgattgatggggaagggcgactggttaactgcgtgtggaaaacctgggcgtgggaaaccgcgtttgatcagattcgtgaagttagcgaccgtgagtttgctgcggtgccaatccgtaccggtcatccgcaaaacgaagtgcgtcttatcgacgtattgctgcgcccggaagtgctggtctttgagccgctgtggacggtgatccccggcaacaaagcgattctgccgatcctctggtcgctgttcccgcaccatcgttacctgctggataccgatttcactgttaatgatgaactggtgaaaacaggttacgcagtgaaaccgatcgccggtcgctgtggcagcaatatcgacctcgtcagccatcatgaagaggtgctggacaaaaccagcggtaaatttgccgagcagaaaaacatctatcagcaactgtggtgtttgccgaaagtggacggtaaatacattcaggtatgtaccttcaccgttggcggcaactacggtgggacgtgtttgcgcggtgatgaatcactggtcatcaaaaaagagagtgatattgaaccgttaattgtggtgaaaaagtaatacatgttgtagcaaccccgtactgattatgaagaataatcagtacggggattaatcaaaatattcaatatttatatattccaatatttattcatttcatatgtgaatatattaaccagtggaatacctgtgttttgattatttctaaaggttttgaatgaatgcttattgtctgatacacaagaaataacactctttttatcgttaaaaaatgatatttcactttgcccatgccgttaaagtcactgataatgcgtccgttcgtaaattcaaaatggcgtaatctaatatatgctaaatttatttgttggccttgatatatacacagggcttttgttattgcttgctctggcatttgtgttgttctacgaagcaatcaatggttttcatgacacggcgaatgcggtggcagccgttatttatactcgtgccatgcaaccacaacttgctgtggtgatggcggcattttttaacttttttggcgtgttattgggcggacttagcgttgcctatgccattgtccatatgttgccaaccgatttgttgctgaatatggggtcaacccacggcctggcgatggtcttttccatgctgctggcggcgattatctggaacctgggaacgtggttcttcggtttaccggcctccagttcgcacaccttgattggtgcgattatcggcatcggtttaaccaacgcgctgttaaccggctcatcggtgatggatgcgttaaacctgcgtgaagtgaccaaaattttctcctcgctgattgtttcccctatcgtcggcctggtcattgcgggaggcctgatattcctgctgcgacgctactggagcgggacgaaaaagcgtgaccgtattcaccgcattccggaagatcgcaaaaagaaaaaaggcaaacgtaaaccgccattctggacgcgtattgcgctgattgtttccgctgcgggcgtggcgttttcgcacggcgcgaacgacggacaaaagggatcggcctggtaatgctggtactggtggggattgcccctgctggcttcgtcgtcaatatgaatgcgtccggctatgaaattacccgtacccgcgatgccgttaccaacttcgaacactacctgcaacagcatcctgaactgccgcagaagttgattgcgatggaacctccattgcctgcagcatcgactgatggcacgcaagtaacagagtttcactgtcatccggcaaatacctttgatgctattgcgcgcgttaaaacgatgctgccaggcaatatggaaagttacgagccgttaagcgtgagtcagcgcagccagctgcgccgcattatgctgtgcatctctgatacctccgcgaagctagcgaaactgccaggcgtcagtaaagaagaccagaacctgctgaaaaaacttcgcagcgatatgttaagcaccattgagtacgctccggtgtggatcatcatggcggtagcactggcgctcggcattggcaccatgattggctggcgtcgtgtagcgatgaccatcggtgagaagattggtaagcgcggcatgacgtatgcgcaaggcatggcggcacaaatgacggcggcagtgtctatcggtcttgccagttatattgggatgcccgtctccacaacacacgtcctctcgtctgcagttgcagggacgatggtggtggacggcggtgggttacagcgtaaaacggtaaccagcatcctgatggcgtgggtatttactttaccggcggcaatttttctttctggtgggctgtactggatagcattgcagttgatttaaccttcctgaaaatgcccggtcctggcgatcgggcatttccatttttgactagtgataaccacgcgcggtcataaaatccgtaatcgctttttctgcatcaaccaacacctgttccagtggctgattggcatcgatatcaaccagttgtgcaccaccaaaggttaactgtggcgttatggcaatcttcctcgccagcgattcccgtttatggtcgggtttacgtgcacaggcaacttcaaggtcaacattgagtttgatgaccagatcaggcttatggctcgccatccagtgaaacgctttacgttcctggcttgccagccatgagacaaaacgaccaccttcaacgttaggtgggaacaccgtaccatcgtaagcgccaggaatttggtcctgaggataacggtcggttagaacaattaacccgcgacgacgacaggcaagcatatgacgaaagcgcagtaagcgacgggcgacaaacgctgtaattaccagcgccggaactggtccaggcaatttttttgctgttttcacctgatttcgttcaattgttttatgtaaggattttcccatcaacggtaattttgtcactgcacgaccgacatttccggcctgttttcctaaatgaactctttcggcagcaccatatttttcgacaacggtaataagatgttcacacaccgttgacttgcctgaaccatcgctaccaataacggcaattaatggaggtgttattgactgcatgaatatatcctttaatttaaatatccattaaaaatatttatttggttaatatgtttttatgaaagcgtaattcaggtcaatgtcacaattaaccattgtcacaataaggttgaacggatattctgagcacggaccacgtaatattcaatacattatttactgccgggtttttcgtgaatcaacgtaatatgtcaataattaattccacgccagtgcgtgttattgccattgtaggatgtgatggttcaggtaaatcgaccctcacggcaagcctggtaaatgaactggcagcaagaatgccaacagaacacatttatctcgggcaatcgtccgggcgaattggcgaatggatttcacagctccctgttattggcgcaccttttgggcgttatctgcgaagtaaagcggcacatgtgcacgaaaagccctcaacaccgcctggcaatattactgcactggttatctatctgctttcctgctggcgggcgtacaagtttcgcaaaatgttgtgtaaaagccagcaaggctttctgctcatcaccgaccgctacccgcaggttgaagtgccggggtttcgctttgatggcccgcaattggcaaaaaccacgggcggtaacggttggataaaaatgttaaggcagcgcgagctgaagctgtaccaatggatggcatcttatttgcccgtattgttgattcgtcttggcattgatgaacaaaccgcgtttgcgcgtaaacctgaccaccaactggcagcgttacaggaaaaaatcgccgttacgccgcaactgacattcaatggcgcaaagatccttgaactggatgggcgacaccccgccgatgaaattctgcaagcgtcactacgcgcaattcacgccgcgctttcctgatcaccaaaatggataggggatgatttaacgaatggatgcactacaaactcaaactgttaatagtacaaccgcgccgcagcccaactacattccggggctgattgcggtggtcgggtgtgatggcaccggtaaatccacactgaccaccgacctggtgaaatcgctgcaacaacactggcaaaccgagcggcgctatctggggctgctctccggcgaagacggcgacaaaatcaaacgattgccgttggttggcgtctggctggaacggcgactggcggccaaatcctcgaaaacccaaagcatgaaaaccaaatctccggcgctatgggcggcggtgattatgtactgcttctcgctgcgaagaatggcgaatctacgcaaggttcagcgactggcgcaaagtggcgttctggtggtcagcgatcgcttcccgcaggctgaaatttcgggcttttattatgatggaccggggattggcgtcgaacgtgcgaccgggaaaatcagcatgtttctggcgcagcgcgaacggcgtttataccaacaaatggcgcaatatcgcccggaattaattattcgcctgggcattgatattgagactgccatctcccgcaagcctgaccatgactatgccgagctgcaggacaaaatcggtgtcatgtcgaagattggctataacggcacaaaaattcttgagattgattccagagcgccctacagcgaagtgctggaacaggcacagaaggcggtttctctggttgccatcgtttctgaccgccgaagtttaacttaaggctggcgggatactttttactatcaacgataaggtcaggctgaattggcgggttttaacatcaaacattggtttgcagatggcgcgtttcgcaccattattcgcaatagcgcctggttaggctccagtaatgtcgtgagcgccttgctgggtctgttggcgctctcgtgtgccggtaaagggatgacgcccgccatgtttggcgtactggtgattgtgcaatcgtacgccaagtcgatcagcgattttattaagtttcagacatggcaactggtggttcagtacggaacaccagcattaaccaacaataatccgcagcaattccgcaatgtcgtctcattttccttctcgctggatatcgtcagcggcgcggtggcgattgtcggtggcattgccttactgccattcctttcccattcattaggtctggatgaccaaagtttttggctggcagcgctctattgcacgctcattccttcaatggcttcctccacgccgaccggcattctgcgtgcggtagatcgcttcgatttaattgctgtacagcaggcgacgaaaccttttctgcgcgcagcggggagcgtcgtagcctggtattttgactttggttttgcgggttttgttattgcctggtacgtgtcgaatctggttggcggcaccatgtactggtggtttgccgcgcgcgaattacgccgccgaaatatccataacgccttcaaattgaatctgtttgagtctgcccgacacattaaaggcgcgtggagttttgtctggtcaaccaacattgcccactccatctggtcggcgcgtaactcgtgcagcacagtgttggtggggatcgtgttaggacccgctgccgccgggttatttaaaatcgccatgacattcttcgacgccgccggaacgccagcgggtttgctgggtaaaagtttttacccagaggtgatgcgtttagatccgcgcaccaccagaccgtggttgttaggtgtgaagtccggtttactggcgggcggaatcggtattctggtggcgctcgcggtgttgatcgtcggcaagccgctcatttcgctggtgtttggcgttaagtatctcgaagcgtatgacctgattcaggtgatgctgggcgcaattgtgatttcgatgctgggcttccctcaggagtcattgctattgatggcgggaaaacagcgcgcttttctcgtggcgcaaaccatcgcctcaatcggctacatcgtattgctgttcatgttctgtcatctgtttggtgtgctgggagcagcgtttgcttacttcggtgggcaatgtctggacgtggcgctctcgttaattccaaccttaaaggcattttttcagcgccattccttgctttataacgcagccggagagaaatcctgatgatgagaaaatatctcccgcttgaggcgagcgagcgtctatttgttgcgattgaagaagatgatgtcgttgatgcacaggttagtttgccgccgactattgcactaagttgtaccaccgaaatcattcatgataattacgcgttatgcctgcaattctggctcaatggcgttgatcgtcaggagttactgcgtttagttcgcaaacaagccaaaggcgatgagctgactgctgatgagcgcaaacaatttaaatacatgcgagcgcgctacaagcacctgcgttttgcgcaacggctgtatttaaagaagcatcaggccggatttttattcggcaaaacgaccgtttttctggggcgttttcaggacggctttcgtaacggtaagaaaaatattgtgtcgtattacggcaacctgttacggatttatttaagctctccggtctggtcgttggtgaactattcattacgccatagccagttagaaagcgtaagcagttttattgcctatcggcaaaagcaaatgcataccctgaaagagattattgccaaaccgcgactaaccggtagggaatttcatgatgtgcgaaaaatcatcagccagcaggtttcttattacgacaccttaagatcgcttgatcctgaaaataaagaggcgttacagatatcccgcttcctcgccgccattaatggcctgatgggagataaacacgacgacatggtggcggatgatatggaaaaccgccagtcgtatgatgcaccggtggcgctggatagcgatattcgtcagcgcttagagctgctgatttcgcgttttccgctatagccggagcaatgatgtcatctcgtttgattattgcgttgattatcatgctcttagccccgggtgtgcaggcacacaatttcgtcactggcaaaacggttacccctgtttatatccaggaaggcggcgagctgcttctgaatagcgacgacgaaattcactaccaaaagtggaacagcacacaattagcgggaaaagtccgcattattcagtatatcgccgggcgtaagtcggcgaagaaaaagaactcactgttaattaaagcggttgaagcggcaaactttccgcaggatcgttttcagcccaccaccattgtgaacaccgatgatgccatctttggtactggctattttgttgttggcaaaatcgaaaaaaataaacgccgctatccgtgggcgcaattcgttattgacggcaatggacagggacgcgttgcctggcgcttgccggagcagagttcaaccattctggtgctgaataaagccgggcaaattcagtgggcaaaggacggcagcctgacgccggaagaggtagatcatgtcattgcgttggcgcagaaactgatcaatgaataaaaaactcaaaggattgagggcgttagtgagatgaagctggttgaacactacatcatgcgtggtacgcgccgtctggtgctgattatcgtcggttttctgatctttattttcgccagctactccgcacagcgttatctgaccgaagcggcaaatgggacattagctcttgatgttgtgctggatatcgttttctacaaagtactgattgcactggagatgttgttacctgttggtctgtatgtgtcagttggcgtgacgctagggcagatgtataccgactcggaaattaccgctatctctgcggcggggggcagtccgggacgcttgtacaaagccgttctttatctggcgataccgctaagtatttttgtcacccttctgtcgatgtatggtcgtccgtgggcttatgcgcagatttatcaactggagcagcagtcgcagtcggagctggatgttcgccagttgcgggcaaagaaatttaacactaacgataacggacgaatgatcctttcgcagacggttgatcaggataataatcgcctgactgacgcgctgatttatacttctactgccaatcgaacccgcattttccgcgcccgttcggttgatgtggttgacccatcacccgagaaaccgaccgttatgttgcacaacggcactgcctatcttatcgatcatcaggggcgtgatgacaacgaacagatctaccgtaatctgcaattacatctgaatccgctggatcaaagccctaacgtcaaacgcaaagcgaaatcggtcacggagctggcgcgctccgtctttccagccgatcatgccgaactgcaatggcggcaaagccgtggcctgaccgcattgttgatggcgctgctggccatttcattaagtcgggtaaaaccgcggcaagggcgattttcaacgttattgccactgacgttgctgtttattgccattttttatggcggtgacgtctgccgtacgctggtggctaacggcgcgattcccctcattcctggtttgtggttagtacccggactcatgctaatgggcctgctgatgctggtcgcacgcgacttctctttgctgcagaaattttcccgatgaatgttttcagccgctatttaatccgtcatctctttctcggttttgccgccgccgcagggctattgctgccgctttttaccaccttcaacctgattaacgaactggatgatgtcagcccgggcggttatcgctggactcaggcggtgctggtggtgctaatgaccttaccgcgcacactggtcgaactttcgccatttatcgccttattgggagggattgtcggcctggggcagttatcgaaaaacagtgagcttaccgccattcgcagcatggggttttctatcttccgtattgcactggtggcgctggttgcagggatattgtggactgtttcgttaggcgcgatagatgagtgggtagcgtcgccattacagcaacaggcgttgcaaatcaaatcgaccgccaccgcgttgggggaggacgatgacattaccggcaatatgctgtgggccaggcgtggtaatgaatttgtgacggtgaaatcgctgaacgagcagggccagccggtgggcgtggagatttttcattatcgcgacgatctctcgctcgaatcctacatttatgcacgcagtgccaccattgaagacgacaaaacgtggatcctgcatggtgtgaatcataaaaaatggctgaatggcaaagaaacgctggaaacattagataatcttgcctggcaatcggccttcaccagtatggatcttgaagagttatcaatgccgggcaatactttttctgtccgtcagcttaatcattacatccattatttgcaggaaaccgggcaacccagcagcgaataccgccttgcactgtgggaaaaactggggcaacccatcctgaccctggcgatgattttgctggctgtgccgtttacctttagcgccccgcgctcgccagggatgggtagccgtctcgctgtaggtgtcatcgttggcttactcacctggatcagctatcaaatcatggtcaatctgggattgctatttgcgttgagcgcacctgttaccgcgctcggtttaccgatagcgtttgtgctggtggcgttgagcctggtgtattggtatgacagacaacattaaacccgccgtggcgcaacaccacggcgggctcacattactgcttcagagtagcaaatgcctgaatgatggcatcgatttgctcacgactgtgagcagcgtttacgctacagcgcagcagcgtgatgcctgcaggcgcggcaggtggcaggataagattcacataaacgcccagcgaaataagctcgcgccagatgcgtaaaccgtcctctttcgaaccgattattaccggcactaccgggctaatatgtgaacttaactcataacccagtttttgcagaccgtcatacagatggttggcattatccatcagcttttgccgcagctctggttgtgtggcaatagttcttaacgacgagcgcacggtcgcaatgcaggacggagaaggagaggcggtaaaaatatacgggcggctgccgtagcgcagcacttccatcgcttccgaaccgacagcaaaaccgccaatcgaggccagacttttactgaaggtgccaacgataatatccacatcatcttcaacgccgacagcttcagccagtccgcgccccgttgcgcctaacacgccaaacgaatgcgcttcatcgacaatcaaataaccaccgagacgacgtttgatatcaacaatttccgctaacggcgcaacgtcaccgagcatgctgtagataccctcaacgatgataatcgcctctttcgcccgttcaccgaggcgaaccatgcgccgttccagatctttagcatcgttatggcggaaacgaataatttccgcgccaccgagagaacaggcgtcataaatactggcgtggctgtcggcatccagtaacaccacggcgttatggtcggcaagtgcgctgatgacgcctaaattagcggtataaccggttgaaaaaacgatagcggtagggcgattgaaaaactcggcaatctctttctctaacgccaggtgcggcgcataactgccgtttgccatacgagaaccggtggtgccggtaccttgggccgctaacgcggcctgaccttcgctgatggcatcatgattaaaggttaaaccgagataattattggtcccggccagaatcacttttttattgccgatccggccttcggtggcggaatacacttcatcaatacaggtgccaaacggtgttaacccgttgtcactaaattgcagtcgctcgccagcaaggcgcgcatatttatcgtatagccccattatttattctccagccatggaagtagagtttccattaattgcgcaggggttttgacatccagcagaatattaataggaatggaaatatcgaatctgtcttccagcatcattaagagatccatcactttgatcgactccaggccaagatcgttgacgagatcgctgtcgggcttaatttccacaccgttttcgaccaaatcctgtaaacaggaaaggatgtaatccattactatttcacgatttaccatagaaacgttaacacacctttaaacaagacaatcaaaatagcccgttgcgtaatgcgtgttccaggctaatcccgggaaaccaattaatatcttcagaaatacggttattacttgccgaccagtcggcgtgggttaattcacgaattttcgagcgggtcagcataggttctttacctgccaggcgactcaacgcggtactgatatccgcaaggccggtgagtaccggcagaggaatgccaaccattcgcacggaaccgcaacgggcgtcggcggcaagttgctgtacgcgttgccagtcatagccgccgacgacgccatcgcataattcataggtttacgtctgtatagtttcggcgcttaaccactgacccactgcttgcgcgaaatcggtgacgtgcagaaaagagagctgtgtatctggcgcaccaagtcgtggcagcaggccgcgcagcatccagtcaaacagcggttttaactctttatcgccgggaccatacacggctgtcgggcgaaaaacgcccagcgtaatttcgtccgccattgctgccagtcgttgctcggcgacgtatttggattttgcataccaggagagctcgggatggcgcgccgccagcgaagagataaacagaaaacgttggcaaaagccgctctcttttgctgcttgcatcaggcgcaggctgccgtcaacgttacagcgggtgaaaatctcttctttgtgcccgcgcacttgcccggcgcaatggaccactacgctggctccggcaaccagctcgctaagtgaatgagtatcttccagcgaaccgcgcacccaggtgagattatcattgacgtgagcgcgggcagtacgcgtcaatgcgcgaacgtgaaagccgcgggcgagcaggttatcgataatatatttaccgataaacccggtagcgcccgtcaccgcgacagtttgattcatgccagggattcctgcacattaagactggcagcataagccttctgataacgttttttcgcttccgcacgggcaggcttgccggaggacgttcggggaatactgtggggcggcaacagatcgatagccgcggtcacgccaaattcgctttggatccgtgccgccagcgcgtggataagctgcccgcgacgttcttcgtcgctgatccgacactggatctgcaaaatgattttttcctgggcggtaacaaaagcaatcgcatcgccagaatgaatttccggttcctgttccgctatatattcaatatcctgcggccagatattacggccacgaataataatcagatctttaatgcgtccggtgacatacagataaccgtccagcagataaccgaggtcgccggtgtctaaccagcccgtcgcggcaatctcgtcttgcgaaacctggtcgccaaagtaaccgctcatcagactgggaccggagatgcaaatatggcctaccacacgttccgcgaccggcatacctgcttcattgcggatttcaataccatgttccggcaacgctttgccgcagttgacgaaagtcgatacggcgcgtgtctctgcacccggcgcgacggctttaccctgatattcgaggatgtcgcgatccacttcgttaaccacaaccccggaggcttcatcagagaagctgacagccagcgcattttctgccagtccgtagcacggcatgaaagttttattgtcaaagttaacctgacggaaacattcagcgaattgatggagttgttctgcggagatgggttctgcaccaataccagcgacgcgccagcaggaaagatccagttcagcgagatctttttcattcacgcggcgctggcacaattcatagccaaacggcggcgcaacggaaacggtgccgcgatttttactgatcaatttaagccattgcagaggacgcatggcaaaatcctgagtgcgcaaataatctactgaaagctgcgtggcgacgggggtcaggagaaagccgaccagtcccatatcatggtagaaaggcagccaggagacgcagcggtcgccagggcgtaatttaatgccgtcgtggcttatagcacgtagattagctatcacttcgcgatgggtgataatgacgccacggggaaaacgggtgctgccggaggtgtactggaggtaggcgatatcgttcggaactggacgctggagcgcaacatcggcttccggtaatgccttaaaccaggcgtggcttaaaacatgtaattcggggttgtcatgcgtcgcggcattgaccagtggcaaccactcatcaccagtgataatggctgcgggctggcaacttgccagtaaaccctgcaatttggcgctccaggaatcccgctgaccaacgcccattggaatcgccaacgggacggcgactaagccggcatactggcaggcaaaaaaagcctctacgaactcgctacttgtttcggcaatcagtgccacgcgatcgccttttttcaggttcagcgataacaaccgcttcgcaccagcttcggcacgtgcttttaacgtctgatattccagttgatcttcaagttggcaacgtctgtcataaaaattcattccggcgctactcagagcggcgtagtccaaagcatcaacaagcgttggaaaatcggcatagcgcataggtagggaatgcgtaaagattttattagacatatacaccacgaaaaaattggatatccaaaataaaatgacaataatgcggtggattatataggcataaaagataaatgagatagtattttcatcagtgtgaaaatgaacattgatttaaataatgagtttgagtttttttgtttttattgtgaatgatatttaatttatgaatatattaagaagaagccttgtccggtcgccttaaatcgacaaaaggcattgtggcgcttctgtgtagtctctgaccttatcgtaatcattaataaatactatttattcgtcgtttgtattcattgggttgattattaaggtgccgttcgttgctgttgcaacctgtttgtcaccgttaattatttgttacccacagaacagaactatggaatgcgatctgctgatgattaaaattgaaaaagtaattaataaaaatgaccttaaggcatttatcgcttttccgtcatcactttatcccgacgatccaaactggataccccctttattcattgaacgcaacgagcatttgtctgcgaaaaatccggggacggaccatatcatctggcaggcgtgggtggcaaaaaaagcggggcagatagttgggcgtattaccgcgcaaatagataccttgcaccgcgagcgttacggcaaagataccggtcatttcggcatgattgacgccattgatgatccgcaggtttttgccgcgttgtttggcgcagcggaagcgtggttgaagtcacaaggtgcaagtaagatcagcggtcctttcagcctgaatatcaatcaggaaagcggattactgattgaaggttttgacacaccaccctgtgcgatgatgccacacggcaaaccgtggtatgccgcgcatattgaacaactgggttatcacaaaggcattgatttactggcgtggtggatgcagcgaaccgatctcactttctctccggcgctaaaaaaactgatggatcaggtgcgcaaaaaggtgaccattcgctgcatcaatcgtcagcggtttgccgaagagatgcagatcctgcgtgagattttcaactctggctggcagcacaactggggatttgtgccgtttaccgaacatgaattcgcgaccatgggcgatcaacttaaatatctggtgccggacgatatgatctatatcgctgagattgattctgcaccctgcgcgtttattgtcggcttgccgaacatcaacgaggcgattgccgatctgaacggatcgctctttcccttcggctgggcaaaattgctgtggcgtttgaaagtcagcggtgtgcgaactgcgcgagtaccgctgatgggcgtgcgcgacgagtatcagttcagccgcatcggcccggtgattgcgctgttattgattgaagccttacgcgatccgtttgcccgccggaagatcgatgcgctggagatgtcatggatcctcgaaaccaatacaggcatgaataacatgctggaacgcattggggcggagccgtacaagcgttaccgattgtatgaaaagcaaatttaataccagctaactcaggttcatctccagcggcaccgccgagcgaatcaaatggtggccttccagctcgatatcgtggagattctttttcacggcccgcacatgatcgcgtgctgcgcgctgggcgacgtgcggcagccgctgcaacaccgcgttgtagatccgcgcatgctggcgatcgatctgctttttttgctgtggtcgatggtagagattatttacgctggcaaacactgaattaaacatcagatcggtcaatgattgcagcgtaaacaccagcacctgattgtgagaagcctgacaaatggcgagatggaaagcgtgatccaactgcgcatgttcgatcagcgaaatctctttgttattctcactggcggcgagcattttttcataacagcgagttatcacaacaaaatcagcctgcgttcccagcgttgccgccagccttgccgattcgccctccagtaatgcgcgaacgtcgagcagatcgtacagcgttcgcggctgcgtgctgaacagatgaattagcgggctggtgtcctgcacccgattaagccgtgcgacacgagaatcgcgaccctgcgccgtttcaataatcccgcgcccgcgcagcacggtcagcccttcacgcagtgcggagcgtgagaagccgagcttttcacacagtcgacgttccgagggaagcggctgaccgaccttcagtacgccgtcgataattaaccgttcgatactctctgcaaccacttcgcaaatagggcgacgttcatctttcattcccggacctcgtgcacaggtaggaccaatttttctgttcttaactcgcaaaacacgcacatcacgtaagtgattatgttacatcaatttaacattgagttaaccaagacaaggtcacagagctggaaaaaaaatggtctgaccggtagctaaagagatagacgaaaacgaaaagcccgcttaataactgttcacagaagcagcgcgcaaaaatcagctgccacacaacacaacaaagcgaagcctactcatgagcatcttgtacgaagagcgtcttgatggcgctttacccgatgtcgaccgcacatcggtactgatgacactgcgtgagcatgtccctggacttgagatcctgcataccgatgaggagatcattccttacgagtgtgacgggttgagcgcgtatcgcacgcgtccattactggttgttctgcctaagcagatggaacaggtgacggcgattctggctgtctgccaccgcctgcgtgtgccggtggtgacccgtggtgcaggcaccgggctttctggtggcgcgctgccgctggaaaaaggtgtgttgttggtgatggcgcgctttaaagagatcctcgacattaaccccgttggtcgccgcgcgcgcgtgcagccgggcgtgcgtaacctggcgatctcccaggccgttgcgccgcataatctctattacgcgccggatccttcctcacaaatcgcctgctcgattggcggcaatgtggcggaaaatgccggcggcgtccactgcctgaaatatggtctgaccgtacataacctgctgaaaattgaagtgcaaacgctggatggcgaggcgctgacgctaggatcggatgcgctggattcgcctggttttgacctgctggcgttgttcaccggatcggaaggtatgctcggcgtgaccaccgaagtgacggtgaagctgttgccgaagccgcccgtggcgcgggttctgttagcaagctttgactcggtagaaaaagccggacttgcggttggtgacatcatcgctaatggcattatccccggcgggctggagatgatggataacctgtcgatccgcgcggcggaagattttattcatgccggttatcccgtcgacgccgaagcgattttgttatgcgaactggacggcgtggagtctgacgtacaggaagactgcgagcgggttaacgacatcttgttgaaagcgggtgcgactgacgtccgtctggcacaggacgaagcagagcgcgtacgtttctgggccggtcgcaaaaatgcgttcccggcggtaggacgtatctccccggattactactgcatggatggcaccatcccgcgtcgcgcactgcctggcgtactggaaggcattgcccgtttatcgcagcaatatgatttacgcgttgccaacgtctttcatgccggagatggcaacatgcacccgttaatccttttcgatgccaacgaacccggtgaatttgcccgcgcggaagagctgggtgggaagatcctcgaactctgcgttgaagttggcggcagcatcagtggggaacatggcatcgggcgagaaaaaatcaatcaaatgtgcgcccagttcaacagcgatgaaatcacgaccttccatgcggtcaaggcggcgtttgaccccgatggtttgctgaaccctgggaaaaacattcccacgctacaccgctgtgctgaatttggtgccatgcatgtgcatcacggtcatttacctttccctgaactggagcgtttctgatgctacgcgagtgtgattacagccaggcgctgctggagcaggtgaatcaggcaattagcgataaaacgccgctggtgattcagggcagcaatagcaaagcctttttaggtcgccctgtcaccgggcaaacgctggatgtgcgttgtcatcgcggcattgttaattacgacccgaccgagctggtgataaccgcgcgtgccggaacgccgctggtggcgattgaagcggcgctggagagcgccgggcaaatgctcccctgtgagccgccgcattatggtgaagaagccacctggggcgggatggtcgcctgcgggctggcggggccgcgtcgcccgtggagcggttcggtccgcgattttgtcctcggcacgcgcatcattaccggcgctggaaaacatctgcgttttggtggtgaagtgatgaaaaacgttgccggatacgatctctcacggttaatggccggaagctacggttgtcttggcgtgctcactgaaatctcgatgaaagtgttaccgcgaccgcgcgcctccctgagcctgcgtcgggaaatcagcctgcaagaagccatgaacgaaatcgcccagtggcaactccagccgctacccattagtggcttatgttacttcgacaatgcgttgtggatccgccttgagggcggcgaaggatcggtaaaagcggcgcgtgaactgctggggggcgaagaggttgcgggtcagttctggcagcaattgcgtgaacaacaactgccgttcttctcgttaccaggtaccttatggcgcatttcattacccagcgatgcgccgatgatggatttacccggcgagcaactgatcgactggggcggtgcgttacgctggctgaaatcgacagccgaggacaatcaaatccatcgcatcgcccgcaacgctggcggtcatgcgacccgctttagtgccggagatggtggctttgccccgctatcggctcctttattccgctatcaccagcagcttaaacagcagctcgacccttgcggcgtgtttaaccccggtcgcatgtacgcggaactttgaggagcaggctatgcaaacccaattaactgaagagatgcggcagaacgcgcgcgcgctggaagccgacagcatcctgcgcgcctgtgttcactgcggattttgtaccgcaacctgcccaacctatcagcttctgggcgatgaactggacgggccgcgcgggcgcatctatctgattaaacaggtgctggaaggcaacgaagtcacgcttaaaacacaggagcatctcgatcgctgcctcacttgccgcaattgtgaaaccacctgtccttctggtgtgcgctatcacaatttgctggatatcgggcgtgatattgtcgagcagaaagtgaaacgcccactgccggagcgaatactgcgcgaaggattgcgccaggtagtgccgcgtccggcggtcttccgtgcgctgacgcaggtagggctggtgctgcgaccgtttttaccggaacaggtcagagcaaaactgcctgctgaaacggtgaaagctaaaccgcgtccgccgctgcgccataagcgtcgggttttaatgttggaaggctgcgcccagcctacgctttcgcccaacaccaacgcggcaactgcgcgagtgctggatcgtctggggatcagcgtcatgccagctaacgaagcaggctgttgtggcgcggtggactatcatcttaatgcgcaggagaaagggctggcacgggcgcgcaataatattgatgcctggtggcccgcgattgaagcaggtgccgaggcaattttgcaaaccgccagcggctgcggcgcgtttgtcaaagagtatgggcagatgctgaaaaacgatgcgttatatgccgataaagcgcgtcaggtcagtgaactggcggtcgatttagtcgaacttctgcgcgaggaaccgctggaaaaactggcaattcgcggcgataaaaagctggccttccactgtccgtgtaccctacaacatgcgcaaaagctgaacggcgaagtggaaaaagtgttgcttcgtcttggatttaccttaacggacgttcccgacagccatctgtgctgcggttcagcgggaacatatgcgttaacgcatcccgatctggcacgccagctgcgggataacaaaatgaatgcgctggaaagcggcaaaccggaaatgatcgtcaccgccaacattggttgccagacgcatctggcgagcgccggtcgtacctctgtgcgtcactggattgaaattgtagaacaagcccttgaaaaggaataacaaaatgaaaactaaagtcattcttagccagcaaatggcgagtgcaattattgccgcaggtcaggaagaggcgcagaaaaataactggtctgtttccattgctgttgccgatgacggcggtcatctgctggcgttaagtcgcatggacgattgcgcgccgattgcggcttatatctcccaggagaaagcgcgtaccgccgcgctggggcgtcgtgaaactaagggctatgaagagatggtgaacaacggacgtaccgcgttcgtgactgcgccgttattaacgtcgctggaaggcggcgtaccggttgttgtggatgggcaaattattggtgccgtgggcgtttctggtttaaccggagcacaggatgcgcaggtcgcgaaagcggcagcagcggtgttggcgaaataagcgaaaacgaggagataaacaatgagtcaaaccataacccagagccgtttacgcattgacgccaattttaaacgttttgtggatgaagaagttttaccgggaacagggctggacgctgcggcgttctggcgcaattttgatgagatcgttcatgatctggcaccagaaaatcgtcagttgctggcagaacgcgatcgcattcaggcagcgcttgatgagtggcatcgcagcaatccggggccggtaaaagataaagcggcctataaatctttcctgcgtgaactgggctacctggtgccgcaaccggagcgcgtgacggtggaaaccacgggcattgacagcgaaatcaccagccaggcggggccgcagctggtggttccggcaatgaacgcccgctacgcgctgaacgcggcgaacgctcgctggggctcactgtacgatgcgttatacggcagcgacatcatcccgcaggaaggggcgatggtcagcggctacgatccgcaacgcggtgagcaggttatcgcctgggttcggcgtttcctcgatgaatctctaccgctggaaaacggcagctatcaggatgtggtggcgtttaaggtggttgataaacaattacgcatccagttgaaaaatggtaaagaaaccacgttacgtactccagcacagtttgtcggttaccgtggcgatgccgctgcgccgacctgcattttgctgaaaaataacggcctgcatattgagctgcaaatcgatgccaatgggcggattggcaaagacgatccggcgcacatcaacgatgttatcgtcgaagctgctatcagtaccattctcgactgcgaagattcggtcgcggcggttgatgcggaagataaaatcctgctgtaccgcaacctgctgggcctgatgcaggggactctgcaagagaaaatggagaaaaacggtcggcaaatcgtgcgtaaactgaatgacgatcgtcattacaccgccgccgatggctctgaaatttctctgcacggacgctcgctgctgtttatccgcaacgtgggtcatttgatgaccattcctgtgatttgggacagcgaaggcaatgaaatcccggaaggcattcttgatggcgtcatgactggcgcgattgccctctatgatttaaaagtgcagaaaaactcgcgcactggcagcgtctatattgtgaaaccgaaaatgcacggtccgcaggaagtggcgttcgccaacaaactgtttacccgcattgagacaatgctcggtatggcaccgaataccctgaaaatgggcattatggatgaagaacgtcggacctcgctgaacttgcgtagctgtatcgctcaggcgcgcaaccgcgtggcgttcatcaataccggtttcctcgaccgtaccggcgatgaaatgcattcggtgatggaagctggcccgatgctgcgtaaaaatcagatgaaatcgacgccttggatcaaagcctacgagcgtaataacgtgctttccggtctgttctgtgggctgcgcggtaaagcgcaaattggtaaaggcatgtgggcaatgccggacctgatggcagacatgtacagccagaagggcgaccaactgcgtgccggggcaaacacagcctgggttccgtcaccaaccgctgctacgctccatgcgctgcactaccaccaaaccaacgtacagagcgtacaagccaacattgcccagaccgagttcaatgctgaatttgaaccgctgctggacgatctgctgactattccggttgctgaaaacgctaactggtcggcgcaagagatccaacaagagctggataacaacgtgcaggggattctggggtacgtggtgcgctgggtggagcaggggattggttgttcaaaagtgccggatattcacaatgtggcgttgatggaagaccgcgcaacgctgcgtatctccagccagcatatcgccaactggttacgtcacggtattctgaccaaagaacaggtgcaggcgtcgctggagaatatggcgaaagtggttgatcagcaaaacgctggcgatccggcttatcgtccgatggcggggaatttcgctaactcgtgtgcttttaaagctgccagcgatttaatcttcctcggcgtgaaacagccaaacggttataccgaaccgttattacacgcctggcgtttacgcgaaaaagaaagtcattaatagcgtcaaaaaagccccggcaagttttattgtcggggctatgatagtaactgcggtagtacatttatcccggaaataaccggagcgattatcagggtttaacaatattaaatacccgtagcgcattactagcgggcctaaaacaacaatatggacatcttaacgatactctgcgcctgcgtgtgcggaacagaaacccttacccgatatacttgttatgccagaggtagcaattgcgttagcggcgtactgttgctgtaaagtataacgcctatattttacagttcagtcctcttttgcttattacaaccttaagtatatcaagcatataaagataataagagactgaacaatatggttacctggacccaaatgtatatgccgatgggaggactggggctatccgctctggtcgccctgatcccgataatattcttcttcgttgcactcgcggtattacgtctgaaaggacatgtcgctggagcaataacccttatattatctatcctgattgcaatattcgcctttaaaatgccgattgatatggcatttgctgctgcgggctatggctttatttatggattatggccaatagcgtggattattgtcgcggcggtgttcctgtataaattaaccgttgccagcgggcagttcgatattatccgcagctcggttatctccatcaccgacgatcagcgtttgcaggtgttactgattggtttctcctttggtgcgttgctggaaggagcggctggctttggtgcgccggtggcgattaccggtgcgctgctggtgggcctgggcttcaaaccgttatacgcggcggggctgtgtctgattgccaatactgcgccggtggcgtttggtgcgttgggcgtgccgattctggtcgccggtcaggtaacgggaatcgatccgttccacattggcgcaatggcgggacgtcagttaccgttcctgtcggttcttgtgccgttctggctggtagcaatgatggacggctggaaaggggtgaaagagacgtggccagcggcgctggttgctgggggaagcttcgctgtcactcagttctttacctctaactatattggtccggaactgccggatattacttcggcgctggtgagtatcgtctcactcgctttattccttaaagtctggcggccgaaaaataccgaaacggcaatcagcatgggacaatccgcaggtgcgatggtggtaaataagccatcttctggcggtcccgtgccttcagaatatagtctggggcaaatcattcgagcgtggtcaccgtttttaatcttaacggtgctggtcaccatctggaccatgaagccgtttaaagcgttatttgctccgggcggcgcgttttattcactggtgattaatttccagatccctcatttgcatcaacaagtgttgaaagcggcacccattgtcgcccaaccaacgccaatggatgcggtgtttaaattcgaccccctctcggctggcggcaccgctatttttattgcggcgattatctctatcttcatcctcggtgtggggatcaagaaaggtattggcgtctttgccgaaacgctaattagcttgaagtggccgatactgtcgattggcatggtgctggcgttcgccttcgtcaccaactattctggcatgtccaccacgctggcgctggtactggcaggtacaggcgtgatgttcccgttcttctcaccgtttctcggctggctgggcgtattccttaccggctcggacacctcctctaacgccctgtttggttcactgcaatcgaccacggcgcagcaaatcaacgtctctgacaccctgctggtggcagcaaacaccagcggcggcgtaactggcaagatgatctccccgcaatctatcgccgtggcctgcgccgcgacgggcatggtgggccgagaatctgaactgttccgctacaccgtgaagcacagtctgatttttgccagcgttatcggcattatcaccctgctgcaggcgtatgtgtttaccgggatgttagtctcgtaaatcaataaagccggatgatcgttaatatcatccggcttcatttacattattctgtcttattaattgaaaatcatttctcgctttattatccatgcagcaataatgttttgcgttcagataacctgctaaataattaagagcgtgagaacatctattttttatcacgcaaaacaagtctgtattaattatgttcgcttgatgagcaaacaccgttctatctgttgcttttgcaatcttaatcgttaaaactaccaacaaatttatatagttacgttgtgaaatgttgttaattttttgtttgttgaaatttcgtaaaaatagccagatagacatcgtataggggttattcttataaatttcacctgttttctatcaatgatgtcgttttcttaagaatggaggaagttattagagaagataaagcataaaattatttctcccagttacgaattttttaacattgttttgtcacttgcgttattaatgaataagaaatttaaatataagaaatcgcttttagcggctattttgagcgcaaccctgttagccggttgtgatggcggtggttccggatcttcctccgatacgccgcctgtagattctggaacagggtctttgccggaagtgaaacctgatccaacaccaaacccggagccgacgcctgagccaacgccggagcctgaacctacgccggaaccgacacctgatcctgagccaacaccagaaccggagccagaacctgttcctacgaaaacgggttatctgaccctgggcggaagcctgcgggtaactggtgatatcacctgtaatgatgaatccagcgatggctttacctttacaccaggcgacaaagtcacctgtgtggcagggaacaacacgacaattgctaccttcgacacccagtcagaagctgcgcgtagcctgcgtgcggttgaaaaagtgtcgtttagtcttgaggacgcgcaagaactggcgggttccgacaacaagaaaagcaatgcgctctcgctggtcacctccatgaacagttgcccggcgaatacagaacaggtgtgcctggagttctcctcggtgatcgagagtaaacgtttcgactcgctgtataagcaaatcgatctggcaccggaagagttcaaaaagctggtcaatgaagaggtggaaaacaatgccgcgaccgataaagcgccatccactcatacttcaccggtcgtgcccgccaccactccgggaacaaaaccggatctaaacgcttccttcgtgtcggctaacgcggaacagttttatcagtatcaaccttcggaaatcattctctcagaaggtcgcctggtcgatagtcagggggatggtgttgttggtgtcaactattacaccaattccggccgtggtgtaaccggagaaaacggggaattttcctttagttggggggaaaccatctcctttggcatcgacacttttgagcttggttctgtgcgtggtaacaagtcgactattgcattgactgaactgggtgatgaagttcgcggggcaaatatcgatcagttgattcaccgctattcgaaggctggacaaaatcacacgcgtgtagttccggatgaagtacgcaaggtttttgctgaatatcccaacgtgattaacgagattatcaatctctcgttatccaatggtgcgacgctgggggaaggtgagcaagtcgttaatctgcctaacgaatttatcgagcagtttaagacgggtcaggccaaagagatcgataccgcgatttgtgcgaaaaccgacggttgtaacgaggctcgctggttctcgctgacgacgcgcaatgttaatgacggccagattcagggcgttatcaacaagctgtggggcgtggatacgaactacaaatctgtcagcaagttccatgtattccatgactccaccaacttctatggcagcacgggtaatgcgcgcggtcaggcggtggtgaatatctccaacgcggccttcccgattctgatggcgcgtaatgataaaaactactggctggccttcggcgaaaaacgcgcctgggataaaaacgagctggcgtacattacggaagcgccttctcttgttgagccggaaaacgttacgcgcgataccgccacctttaacctgccgtttatttcgctggggcaagtcggtgagggcaaactgatggttatcggtaacccacactacaacagcattttgcgttgcccgaacggttacagctggaacgggggcgttaataaagatgggcagtgtacgctcaacagcgacccggatgacatgaagaacttcatggagaacgtgctgcgctatctgtccgacgataaatggaagccggacgcgaaagccagcatgaccgtaggcaccaacctggatactgtctattttaaacgtcatggtcaggttacaggaaacagcgctgcgttcgacttccatccggattttgcgggcatctctgttgagcatttaagtagctatggcgatctcgatccgcaggaaatgccgctgctgatccttaacggctttgaatatgtgactcaggtgggtaacgatccttatgcaatcccgctgcgtgcagataccagcaaaccgaagctgactcagcaggatgtgaccgatctgatcgcctatctgaacaaaggtggatcggtgctgatcatggaaaacgtgatgagcaatcttaaggaagagagcgcgtctggttttgtgcgtctgttggatgccgcaggtctgtcgatggcactgaacaagtcggtagtaaataacgatccgcaagggtatccgaaccgcgttcgtcagcagcgcgcaacgggcatttgggtctatgaacgttatcctgccgtagatggtgcgctgccgtacaccatcgatagtaagacaggggaagttaagtggaaatatcaggtagaaaacaaacctgatgacaaaccgaagctggaagttgccagctggctggaagatgtagatggcaaacaggaaacgcgttatgcctttattgatgaggccgatcataaaacagaggattctctgaaggctgcgaaggagaaaattttcgccgcgttcccggggctgaaagagtgtactaatccggcatatcactatgaggtcaactgcctggaatatcgtcctggcacgggggttccggttactggtggcatgtatgttccacagtatacgcaactaagccttaacgccgacactgcaaaagcgatggtgcaggctgcggatttaggcaccaacattcagcgtctgtatcagcatgagctctacttccggaccaatggtcgcaaaggtgagcgtctgagcagcgtcgatctggaacgtctgtaccagaacatgtcggtctggctgtggaacgatacgagctatcgttatgaagaaggcaaaaatgacgagctgggctttaaaacgttcaccgagttcctgaactgctacgccaatgatgcctatgcaggcggcaccaagtgttctgcagatctgaaaaaatcgctggtcgataacaacatgatctacggtgacggtagcagcaaagcgggcatgatgaacccgagctacccgctcaactatatggaaaaaccgctgacacgcctgatgctgggccgttcctggtgggatctgaacatcaaagttgatgtcgagaagtatccgggagcagtatcggaagagggacagaacgttactgaaaccatcagcctgtactcgaatccgaccaaatggtttgcaggtaacatgcagtcaactggcctgtgggcaccggctcagaaagaggtcaccattaagtccaatgcgaacgttcctgtgaccgtcaccgtggcgctggctgacgacctgaccggacgtgagaagcatgaagttgcgctgaaccgtccgccaagagtgactaaaacgtactctctggacgctagcggtacggtgaagttcaaggtgccttacggtggcctgatttatatcaagggcaatagctctaccaatgaatctgccagcttcacctttactggcgtggtaaaagcaccgttctataaagacggcgcatggaaaaacgatctgaactcaccggctccgctgggtgagctggaatcagacgctttcgtctataccacaccgaagaagaacctgaatgccagcaattacactggcggactggagcaattcgctaacgatctggatacctttgccagctcgatgaatgacttctacggccgtgatagcgaagacggtaagcaccggatgtttacctataaaaacttgccgggccacaaacatcgtttcaccaacgatgtgcagatctccatcggtgatgcgcactctggttatccggtgatgaacagcagcttctcgccgaacagcaccacgctgccgacgacgccgctgaacgactggctgatctggcatgaagtcggtcataacgccgcagaaacgccgttgactgtaccgggtgcaactgaagtcgctaacaacgtgctggcgctgtacatgcaggatcgttatctcggcaagatgaaccgtgtcgctgacgatattaccgtcgcaccggaatatctggaggagagcaacaaccaggcatgggcacgcggcggtgcgggtgaccgtctgctgatgtacgcacagctgaaggaatgggcagagaaaaactttgatatcaagaaatggtatccagatggcactcctctgccagagttttacagcgagcgtgaagggatgaaaggctggaacctgttccagttgatgcatcgtaaagcacgcggcgatgaggtcagcaatgacaagtttggcggcaagaattactgtgctgaatccaacggtaacgcagcggacacgctgatgctgtgtgcctcctgggtcgcccagacggatctttcggagttctttaagaaatggaatccgggcgcgaatgcttaccagctgccgggggcgagcgagatgagcttcgagggcggtgtgagccagtcggcttacaacacgctcgcgtcactcgatctgccgaaaccggaacagggaccggaaaccattaatcaggttaccgagcataagatgtctgccgagtaagcccgtaggccggataaggcgctcgcgccgcatccggcatgaaataaggcgcaccgggttaacacatttgcccgatgcgcctgcttatcgggcctacagacggggaaagccgcgattatttgcgctggcagacacccgtaggacggataaggcgttttacgccgcatccagcaagttacaacaaataacctttagccatgctttttgatgtttttcagcaataccctgcggcgatgcccgtcctggcaaccgtcggaggattgattataggtagttttttgaatgtggtgatttggcgttaccccatcatgctgcgccaacaaatggcggagtttcacggtgaaatgccgagtgcgcagtcaaaaataagcctggcgctgccacgttcgcactgtccacattgtcagcagaccatccgcgttcgtgacaatattccgctgctctcctggctgatgctcaaagggcgctgccgcgactgtcaggcgaaaatcagcaagcgttatccgctggtggagttattgacagcacttgcttttttgctggcgagtctggtctggccagaaagtggatgggggctggcggtgatgatattatccgcctggctgattgccgcgagcgtcatcgacctcgatcaccaatggctgcccgatgtttttactcagggcgtattgtggacaggactgattgcggcatgggcgcagcagagtccgctcacgctacaagatgcagtcaccggcgtcctggtgggatttatcactttttactctctgcgttggatagccggaatagttctgcgtaaagaagcattaggcatgggcgatgtattacttttcgccgcgttaggtggctgggtgggggcattgtcgctgcccaatgttgctttaatcgcctcatgctgcggcctgatatatgccgttattacaaaaagaggatcaaccacactgccttttggaccgtgtttaagtctgggcggtatagcaacactttatctacaggcattgttttaatgataaccacgtcattatcaaagtgacattttaactcttattaataaccttagagattatttaccatgtcgataaaacagatgccagggagggtattaatatcgctattgttgagcgttacaggattattaagtggctgtgccagccataatgaaaacgccagtttactggcgaaaaaacaggcgcaaaatatcagccaaaacctgccgattaaatctgcgggatataccttagtgctggcacaaagtagcggcacgacgttaaaaatgaccattatcagcgaagcggggactcagaccacgcagacgcctgacgcctttttaaccagctatcaacgacaaatgtgcactgacccaacggtgaaattaatgctcactgagggaattaattacagcataacgattaatgatacacgtacaggtaaccagtatcagcggaaactggatcgcactacctgtggaatagttaaagcataacgtcgggtagatataaattggcgcgggttgtttttcgtgacgcacgaatttatctcattcaatggctgacaaaaattcgtcacactcttaaccagagacaatctcttaatacagacaaagagcatctgcgaaaaattgtacgcgggatgttctggctgatgctgcttattatttctgcaaaagtggcgcattcactctggcgctatttctctttttctgcggaatatatggctgtttccccatcggcgaataaaccgccccgtgcggatgcaaaaacgttcgataaaaatgacgtgcaattaatcagccagcaaaactggtttggcaaatatcagcccgtcgccacgccggtaaaacaacccgaacctgcacctgtggcagaaacgcgtcttaatgtggtgttgcgtgggatcgcctttggtgccagacccggcgcggttattgaagaaggtggcaaacagcaggtctatttgcagggggaacggcttggttctcacaacgcggtgattgaggaaatcaatcgcgaccatgtgatgctgcgctatcagggaaaaatagagcgcctgagcctggcagaagaggagcgttccacggttgctgtgacccgccaaaaagccatcagtgacgaagcaaagcaagctgttgctgaacctgctgtcagtgcgccagttgagatcccgactgccgtgcgtcaggcactggcgaaagatccgcagaaaatttttaactatatccagcttacgcctgtgcgtaaggagggaattgtcggttatgcagtgaagccgggggcagatcgttctctgttcgatgccagcggtttcaaggaaggcgatatcgccattgcgctaaatcagcatgatttcactgatccacgagcaatgattgctctgatgcggcagttaccttcaatggattccattcaacttacggttttacgcaagggtgcgcgccacgacatttccatcgcgctgcgctatccacattgagacgtttgaaaagagtctggtgatccgttttcgtgttgacggcacattacatgaaatgctgcgtccggggcgcaaactggcctcgctgctggtgtcgcgtatcaaggtgatggcgcggctggacattgccgaaaagcgcgtgccgcaggatggacgtattgcgctgttgctgggcggccgggcgattgacgtgcgtgtctccaccatgccttctgcctggggcgagcgcgtggtgctgcgactgctggacaaaaaccaggcccgcctgacgctggagcgtctggggcttagccagcaactgaccgcgcagttgcgccagctgttacacaaaccgcacggcatctttctggtgacggggccgacgggttccggcaaaagcaccacgctgtacgccggattgcaggagctgaacaaccattcgcgcaacattctcacggttgaagatcccatcgaatacatgattgaagggatcggtcagacgcaggttaacacccgcgtcggcatgacctttgcccgtgggctgcgcgcgattttgcgtcaggacccggatgtggtgatggtcggtgaaatccgcgataccgaaaccgcagaaatcgccgtccaggcttcacttaccggacacctggtcctttccacgctgcataccaacacagcggtgggggcgatcacacgtttgcaggatatgggcgtggagcctttcctgctctcttccagtctgacgggcgtgatggcgcagcgactggttcgcacgctgtgtcccgactgccgccagcccgcaccagccactgacgaagaaaaacgcctgctgggaattaccgacgcccgtaccgtcactctgtaccatccacagggctgtcccgcctgtaatcacaaaggttttcgcggacggactgccatccatgagctgatcgtggtggatgccacattgcgtgatttgatccaccgtcaggccggggagctggagctggaacgttatgtccgacaacactctgcgggtatccgcagcaacggcattgagaaagtgctcgccggagaaacctctctcgatgaagttctgcgggtaaccatggaggcgtaatggcactgttttactatcaggcgctggagcgtaatggtcgcaaaaccaaaggtatgattgaggcggattccgcgcgtcatgcccgccagttgttgcgcggtaaagagcttatccccgtgcatattgaagcccggatgaatacttcgtcaggggggatgttgcagcgtcggcggcacgcacatcgtcgcgtggcggcggcagatcttgcgctgttcacgcgccaactggcaacgctggtacaggcagcaatgccgctggaaacctgcttacaggcggtcagtgagcaaagtgaaaaactgcatgtaaaaagcctcggaatggcgctgcgcagccggattcaggaaggttacaccctgtcggacagcctgcgcgaacatccccgcgtctttgattctctgttttgttcgatggttgctgccggagaaaaatccgggcatctcgacgtggtgcttaatcgcctggcagattacaccgaacagcgacagcgcctgaaatcacgtctattgcaggccatgctctatccgctggttctgctggtggtggcaacgggcgtggtcactattttgctgacggcggtagtaccgaaaatcatcgaacagtttgatcatctcggacacgcgctgcccgtctccacccgcacgcttattgccatgagcgatgcgttgcaggccagcggcgtttactggctggcgggtttgctggggcttctggtgctggggcaacggctacttaaaaatcctgcgatgcgcctgcgctgggataaaaccttgctgcgcctgcccgtgatagggcgtgttgcgcgcggactgaatacggcgcgtttttcccgcacgttaagcatcctcaccgccagcagtgttccgctactggaaggcattcagaccgctgccgccgtgtcggcaaatcgctatgtcgagcaacaactgctgttggcggcagatcgcgtccgcgaaggaagcagtctgcgcgctgcgctggcggagttgcgcctgttccccccgatgatgctgtacatgatcgcctccggcgaacagagcggcgaactggaaaccatgcttgaacaggccgcagttaaccaggagcgggaatttgatacccaggtggggctggcgttggggctgtttgagccggcgctggtggtgatgatggcgggcgtggtgctgtttatcgtcatcgccatcctcgagccgatgctgcaactgaacaatatggttggaatgtaatttacggagttatcacatgaattcgttatcccgcacacaaaaaccacgggcaggttttaccctgctggaagtgatggtggtgattgttattcttggcgtcctggcaagtctggtggtgcctaacctgttgggcaataaagagaaagcggatcggcaaaaagccatcagcgatatcgtggcgctggaaaacgcactggatatgtaccgactggataacgggcgttatccaactaccgaacaggggcttgaggcgctgatccagcagccagccaatatggcggacgcccgcaactaccgtactggtggatacattaaacgactgccaaaggatccgtggggcaatgattatcagtatctcagcccgggtgaaaaagggctgtttgatgtttataccctgggggcggatggtcaggaaaacggggaaggcgctggcgcagatatcggtaactggaatttgcaggagtttcagtaagcagtgcctgaacgcggattcacacttctggaaatcatgttggtgattttccttatcggccttgccagttcgggcgtggtacagacgtttgcgaccgattctgaaccgcccgcgaaaaaagcggcacaggattttctgactcgctttgcgcagtttaaggacagggcagtgattgaagggcagacactcggtgtgctaatcgacgcgcctggctatcagtttatgcagcgtcgtcaggggcagtggttgcccgtttccgcgacccggttatcggcacaggttacggtgccaaaacaggtgcagatgctgttacaacccggaagtgatatctggcagaaggagtatgcgctggagctgcaacgtcgtcgcctgacgctgcacgatattgaactggagctgcaaaaagaggcgaaaaagaagacgccgcagatccgtttttcgccttttgaacccgtcacgccgtttacgctgcgcttctactcggcggcgcaaaacgcatgttgggcggtaaaactggcgcacgatggcgcgttatccctcaatcaatgtgatgagaggatgccatgaagcgcggatttaccttgctggaagtgatgctcgcgctggcgatttttgcgctggctgccacggcggtattacagattgccagcggtgcgctgagtaatcagcacgttcttgaggaaaaaacggtagcgggctgggtggctgaaaaccagactgcgctgctctacctgatgacccgtgggcagcgggcggtcaggcagcagggcgagagcgatatggcaggaagccgctggtactggcgaaccacaccgctgagtacaggcaacgcgctgctccaggcggtggatattgaagtcagccttcacgaagacttttcgtcggtcattcagtcacgacgcgcctggtttagcgccgtgggaggccaacagtgagaaggactcgcgctggtttcacgttactggaaatgttggtggcaattgccatttttgcctcgctggcactgatggcgcagcaggtgactaacggcgtcacgcgcgtgaatagcgccgtcgccgatcacgatcaaaaactaaacctcatgcagcaaacgatgagttttctgacccacgatctgacccaaatgatgccgcgtccggtaagaggcgatcagggccagcgtgaaccagctttactggctggcgctggcgtgctggcgtctgagagtgaaggaatgcgttttgtgcgcggcggtgtggttaacccgttgatgcgtctgccgcgcagtaatctgctcaccgtcggttaccgcattcatgacggttatctcgaacggttagcctggccgctgaccgatgccgcaggcagcgtgaagccgacaatgcaaaagttgattccggccgattcgctccgtttgcagttctacgacggcacgcgctggcaggagagctggtcgtcagtacaggcgatccctgtggcggtacgcatgaccctgcattcgccgcaatggggcgagattgaacgcatctggttgttacgcgggccgcaataatcatgatcacctcaccaccaaaacgcggaatggcactggtcgtggtgctggtattgctggcggttatgatgctggtaaccatcacgctttccgggcggatgcagcaacaacttgggcgaacgcgcagccagcaggagtaccagcaggcgctgtggtacagcgccagtgcggaaagcctggcgctgagcgcgctcagtctgagcctgaaaaatgaaaagcgcgtgcatctggcacagccgtgggcatccggccctcgtttcttccctctgccgcaggggcaaattgcggtcaccctgcgtgacgcacaggcttgctttaacctgaatgcccttgctcagccgacaacggcgtcgcgtccgcttgcggtacaacagttgattgccctgatctcgcgcctcgatgtgcctgcttatcgggccgaactgatagccgaaagcctgtgggagtttattgacgaggaccgcagcgtgcagacgcgtctgggccgtgaagacagcgagtatctcgcccgctcggtgccgttctacgccgccaatcaaccgctggccgatatcagcgagatgcgcgtggtgcagggaatggacgccgggctttatcaaaaactgaaaccgctggtctgtgcgctgccgatgacccgccagcaaatcaacatcaataccttagacgtcacgcaaagtgtgattcttgaggcgctgtttgacccgtggttaagccctgttcaggcgcgggcgttattacaacaacatccggcgaagggctgggaagatgtcgatcagtttcttgcacagccgctacttgctgacgtcgatgagcgtactaaaaaacagctaaaaaccgtcctgagcgtggacagcaattacttctggctgcgttcagatatcaccgtgaatgagattgaactgacgatgaactcgttaattgtccgcatgggcccacaacacttttcggttctctggcatcagacaggagaaagtgagtgagttccatccttgagatttttttcccgctttgcgcctccgataccgtccgctggcagcgccgtacacccgacgtggaacacggtatctggcctgacgttgctgacgaacagcttcagcaatggctgcaaaccgatgcgattcgactctacattcccggcgaatggatcagcgtctggcaggttgaactgcctgatgtcgcccgcaagcagataccgactattctgcccgccttactggaagaagagctgaaccaggatatcgatgaactgcatttcgccccgttgaatatcgaccagcaactggcaaccgtagcagtgattcaccaacagcatatgcgcaacattgcgcagtggttgcaggaaaacggcatcacccgcgctaccgtcgcgccggactggatgtccattccttgtgggtttatggcttgcgatgcgcaacgggttatctgccgcatcgatgaatgccggggatggagcgccgggctggcgctggctccggtcatgttccgcgcccagctcaatgagcaggatttaccgctttcgctaaccgtagtcggcattgcaccggaaaagctatcagcatgggctggcgcagacgctgaacgcctgaccgttacagctctgcccgccattaccacttatggcgaaccggaagggaacctgctgacagggccgtggcagcctcgcgtcagctaccgaaaacagtgggcgcgctggcgggtgatgattctgccgatattgctgattctggttgcgctggcagtggagcggggcgtgacgttatggagcgtcagcgaacaggtggcgcaaagccgcacccaggcggaggaacagttcttaacgttgttcccggagcagaagcggattgtgaatttacgctctcaggtgacgatggcgctgaaaaaatatcgcccacaggccgacgatacccggctgctcgccgagttgtcagcgatagccagcaccctgaaatcagcgtcactttccgacatcgaaatgcgtggttttacctttgatcaaaaacgccagatacttcacctccagctacgggccgcgaactttgccagtttcgacaaactgcgtagtgcactggcaaccgattatgttgtgcaacaggacgcgttacagaaagagggtgatgcggtttccggcggcgtaacgttgcggaggaaataacatgttacgcgataaatttattcactattttcagcaatggcgtgaacgccagttaagccgtggcgaacactggctggcacaacacctggcggggcgttctccgcgtgaaaagggcatgttactggcagcggtggtgttcctgtttagcgtcggatattacgtcctcatctggcagccgttgagcgaacggattgagcaacaggagacaatattgcagcagctggtggcgatgaacacccgactgaagaacgccgcgccggatattattgcagcgcgaaaatctgccacaacaacgcctgcgcaggtatcgcgggtcatcagtgacagtgcttccgcgcactcggtggtcatcaggcggatagccgatcgtggggagaatattcaggtctggatagaacctgtggtgtttaatgacctgctgaaatggttaaacgcactggatgaaaaatatgcgctgcgggtgacacaaattgatgtcagtgctgctgagaagcctgggatggtgaatgtgcagcggctggagtttggacgggggtaaagtatcaggagattaatatcaataaaattactctcgttaacgtggcgagagtaattcccccagactttataagctaatttttttcgtgaaggttattgtcagatccaaaagcaaaaacccgccttgtgggcgggttcttaagaattagtggtgcccggactcggaatcgaaccaaggacacggggattttcaatcccctgctctaccgactgagctatccgggcaacggggcgcattaaacctgattcgcctcgtctcgtcaatcaaatttcttcaatttactgcagactgcacaatctatcatcactttgccgatattgcacgcattgtcaggcaaaccaggcggtccaggcggcggaaagcggcattgccagaaggagtgctggaagcatgttgaccaccgggaacattttaatgccacagatgcgtaatccggttgccagcagcaataaaccgcctacggcgctgaagtctgccatcatcgacggtgtggtcagcggtaaaatcagcgcggcagcccacgccagcgttaactggatgatcagtaatgggatactaatcaccgataccgcaatacccagcgagcaggcgaagatcatcgccgtaaagaaatcaagaaatgacttggcgattaaaatactcggatcgccggtcatcccttcgttcatcgccccgaagatcccggtgccgctggcgcaaaacaggacaataatcgcgacataattctgaataaaagattcatgcgctggcttcttacgtgagtgacgaaacagattttgtgctttggcgactgctgtattgacacctttctccagcaaacaaatttcgccaattagagcgccaagtagcgtagctaaaaccatcgctggaaggttggcacatttcaccactagtaaaataccaatccccagcgatgccagaccaaaaatagatgtcatggagacgcggatacgttccggtaagcgttggctgagcagtgcgccgagaacgccacccagtaatactgcactagcgttgataaaagggccgatgaccacaagagttcctgttaactgtattgtttgattttcttattatgaccgtttggtgccgtcgatggcttgtttgttcgcaaagtcctggcttgcacgctttagcgaaaggtgccatgattgcgcgaattttctcctctctgtacggagtttgcccgatgcacgccatctccttacattctctcgcttatcgccgtttcgcgcgaaacgtttccctttctatgttactgctcatgcggtgaagttaacgcacgctcactgcaggacaacagtaaaatcagagcgtttctgcttttactgatgtctggcggtcggagctggtgaccagtttgacccatatctcatggggcagggttttccaccttgtccggtattcttacttccccgaaacgggtttgcgcttatgaaatcaatgaatattgccgccagtagtgaactggtatcccgactttcttctcatcgtcgcgtggtggcgttgggagatactgattttacggacgtcgcggcagtcgtcattaccgctgcggatagtcgcagtggcattcttgcgttgcttaagcgcaccggttttcatctaccggtgtttttgtattccgaacatgctgttgaattacctgcgggcgttacggcggtaatcaacggcaacgagcagcagtggctggagctggaatccgcagcctgtcagtatgaagagaatttgctgccaccgttttatgacacgctgacgcagtacgttgagatgggcaacagcacctttgcttgccctggacatcaacatggtgcgttttttaaaaagcatcctgccggacgccatttttacgatttctttggtgagaacgtctttcgcgccgatatgtgtaacgctgacgtaaaattgggcgatctgcttattcatgaaggatcggcgaaagatgcgcagaaattcgcagccaaagtctttcatgccgataaaacctattttgtgctgaacggcacatcggcagcgaataaagtggtgacgaatgcgctgttaacgcgtggcgatctggtgctcttcgaccgtaacaaccataagtcgaatcatcacggcgcgctgattcaggcgggggcgacgccggtctatctggaagcttcacgcaacccgtttggtttcattggcggtattgatgcgcactgttttaatgaagagtatctgcgccagcaaattcgcgacgttgcgccagaaaaagccgacctgccgcgcccgtatcgcctggcgattattcagctgggaacctatgacggcactgtctataacgcccgtcaggtgatcgataccgttgggcatctgtgtgattacattctgtttgattccgcgtgggtcggttatgaacaatttatcccgatgatggcggatagctcgccgctgctgttagaacttaacgaaaacgatccggggatctttgtgactcagtcggtgcacaaacagcaggcgggattctcacagacgtcgcagatccataaaaaagataaccatatccgcggacaggcgcgtttttgcccgcataagcggttgaataacgcctttatgctccatgcttctaccagccctttctatccgctgtttgctgcactggatgttaacgccaaaattcatgaaggggagagtgggcgtcggctgtgggctgagtgtgttgagatagggattgaagcgcgcaaggctattcttgcgcgctgtaagctgttccgcccgtttatcccgcccgttgttgatggcaaattgtggcaggattatccgacatcagtgttagccagcgaccgccgttttttcagttttgagccgggggcgaagtggcacggctttgaaggatatgccgcggatcagtattttgttgatccgtgcaagctgttactcactacaccaggtatcgatgccgaaaccggcgaatatagcgactttggcgttccggcgacgattctggcgcactatctgcgtgagaacggcattgtgccggagaagtgcgatctcaactccattctgtttttattaactccggcggaaagccacgagaagctggcacaactggtggcgatgctggcgcaatttgaacagcatattgaggatgactcgccgctggttgaggtgttgccgagcgtttataacaagtatccggtgcgctatcgcgactacaccctgcgccagttgtgtcaggagatgcacgatctgtatgtcagtttcgacgtcaaagacctacaaaaagcgatgttccgccagcagagtttcccgtcagtggtgatgaacccccaggatgcgcatagcgcttatattcgcggtgacgtggagttggtgcggattcgtgatgccgaagggcgaattgcggcagaaggggcgttgccttatccacctggcgtgctttgcgtggtacccggggaagtctggggtggggcggttcaacgttatttccttgcactggaagaaggggtgaatttgttgccgggattttcgccggagctgcaaggtgtttatagcgaaaccgatgcggatggcatgaaacggttgtacggttatgtgttgaagtaagaataaaaaaaacgggtcaccttctggcgacccgtttttctttgcgtaattagtggctaaccgtctgtgtgcctgtcgggacacgaacgtgtttatatttgaacatcgccatgaacgcgaaggccagaaccacggagtaaccagcgaaaatcaaccatacggtctgccagtcggtaatgccgttttgggtgtacatctcaacaactctaccgctcacgatgccgccgaggatacagccgaagccgttagtcatcatcaggaacatcccttgtgcactggcgcgaattgccgggctaacttctttttcgacaaacaccgaaccagagatgttgaagaagtcgaatgcgcaaccgtaaacgatcatcgacagtaccagcagtacagtaccgaacggagtcgggtcgccgtaagcaaacagcgcaaaacgcaggatccacgccacaatactgatcatcattacgttcttaataccgtagcggcttaagaagaacgggatggtcagaatgaacagggtttcagagatctgcgaaatcgacatgatgattgacgcatgctgcacaataaagctgctggcaaacatcggatctttgtcgaagctgtgcaggaaggtattaccgaacatgttggtaatctgcagttccgcgcccagcagcattgagaagataaagaagattgccatacgcttgtttttaaacagcgcgaatgcatcgaggcccagcagggttgtccagctctgattcgcttgctgtttagcaaccggaatatgcggcagagtcagggtaaacagaaccagaatggcggaaagtgctgcgccaatatacagctgcatgtggcttaattcgaagccagacaggctcaccacccacattgccatgataaagccgatggtgccccagatacggattggcgggaagtcagtaacgatatccatcccggcattttgcaggcgatagtaagagatggtgttgattaacccaagcgttggcatataagcaaacgagttaatcaatatcacaaggaacatcgcctccggtgtcgtgacctgtgccgccatgaacagcgtgatagcgccaatggtgtggcaaatggcatatacccatttcgcacttaaccatttgtcggccacaatccccagcagcgcaggcataaagaccgctgcgatacccagtgagctataaactgcgccaatagaagcaccgtcaaacttcagggtaacaaacatataggagccgagggtcgtcagccaacttccccacagacagaactgcagaaaagagaggattttcagctgcagcttaagattcatgttaatttcctcacatcgtgatgcggatgagtgtttgaaaaagcacatttgaccgtgcgagatgatgggattctatcaacttcgcggactggttttttgttacctgtggcaaataattgcaaacattcccaatttgcaaaacgaaattgtgatgtggataacatttttgcccctgagcatcgtcaggagcggttaatggaattatcggcggcggtaggatttttgcgcggtattcactttataaagataacggcgagattccgcagagggatggcgggtcgtcagcgtctgataaacatcgcccggcgtcatggtgttaataatattggcagcctgaatcttatcattcgaaaagactcgcagcacgctgcctgcgccgccgttataggcggtgatgacggcataacgccgcgatgttgggttatcaattccgccgagataaacattgttcagcatcgccagatacgcggtgccggtatcaatattgctggcaggatcaaacaagaaactgcggctcggcgtgccggatttcccctgcgagcggaacacatctttcccggcagtatgttgtaccacctgcattaatcccagcgcatcggaacggctgaccgcatacgggttaaaggaagattcggtctgcataattgccagaatcagcgactcatcaacgccatatttccgtgacgcctggcggaccatgccgagatatttgtgcgcacgtttatcaaggtggttcggcaccatgttaatggtgacgctgtagatgatacgcagcccgttgctgcggctcttcagacggtttttcagcagataatccgcgaagttgcttgcgcgaccttcccagcgaatcggctgcccggtgttgtccaccacctgaccgtaaaggaaaggttctttcgaaatcgtaatatcatcaacgtcggaatagagatcgaccgaactcggatcgtcacccatcaataacgttttgataattgcccggcgcaaatgcgcggcaggttctgtcccggcgatggtttcgatagtaatcgtaccgtcatcgaagttgatgtggctgcgggtctgatattgatcggtgtatttcacgtagtccttaggaccagcgatcaccacctctttgaagccccagatgttctcaatattgtgggcaaattgccccatcagaatatcaaaaccgttggtatctttgacccaggcttcgttataggtatcgccttttttggtcgtcgaacaggagatgagcaacggcgcaatcaaagccagcgcgagatattttttcatcattccgggtgcgtgttgtgtttgtttttatgcaagttgccggaggcgtgctccggcactgtttttattttttatcttccggcgtatagccctcgatatgcacctctttaccctcgaacaggaagttgaccatctcctgctcaagcagcttgcggtgctcggcattcatcatgttgagtttcttttcattaatcagcatggtttgcttgtgctgccactgcgcccaggcttctttggagatctcgttatagatgcgttttcccagctcgccggggtacagctgaaaatcctgaccttctgcttcacgttgcaggaaagtacaaaaaatcgttctgctcataaatcatcctctttatcgactcacgcgctaaaccggcgcgccagtgcgtaactgctgtaacaaacgctccacgggagccgccaggccaactgacggcggttgcgctaagttataccagagcgcattgccttcatccatgcagccggtgaatgacgacacgggaagccacataggcacaatatctaagtggaaatggctgaaggtatgccgaaacgcggtcagttgcgtcaggttatcggcagcaatctgccgttgcgccagccactgccgcaaactttcttcgtcggcaaactgcgggaaacagtataaaccgccccacaatccgctcggcggacgctgcgccagcaatacttcatcttcgtgctgtaatagcaaaaagtagccggtgcgctccggcagcgtctgtttcggttttttgcccggataaagcgcccagctattgttggcggcggcaatacatccgttttgtagcggacagagcgaacatttcggtttcgagcgcgtacaaatcatcgcacccaaatccatcatcgcctgattaaaccgttccacgccaaccgcgggcgtcacctgctcgctcaaactccataatttattctcgacctcttttttccctggccagccgcttacagcatagcagcgcgccagcacccgtttgacgttaccgtcgagaatcggaaagtgcttacccagagaaagcgagagaatcgcgcctgcggtggaacgcccgacgcccggcagtgctgcaacttcctcaaaggtttccgggaatttaccgccgtgtaaggtcgccacttgttgtgccgctttatgcagattgcgcgcgcgggcgtaatagccaagcccggtccacaagtggagaacttcgtcgagcggcgcattggcgagatcggtcaccgtcgggaagcgcgccataaagcgttcaaaataggggataacggtcgcaacctgagtttgttgcaacatcacttctgagagccatactttgtagggcgtcttgtcaatttgccagggcagagtttttcgcccgtatttatcgtaccagtccagaacctgggctgaaaattgcgacgcttgcatggtcaccgaattcactgttgttgggggcaagattgcagcacagcgacggcagggtgtaaaccggaactttccgcagccacggccttatcatgcttgcatccggcaactaactttggataatgcccgttttcagaacactttcacaagcgactaaacctttatgaaaaacgacgtcatttcaccggaatttgatgaaaacggccgcccactgcgccgtatccgtagttttgtgcgccgccaggggcgactgaccaaaggccaggaacatgcgctggaaaactactggccggtgatgggcgttgagttcagcgaagatatgctggatttccccgcgctttttggccgtgaagcgccggtgacgcttgagattggttttggcatgggggcgtcgctggtggcaatggctaaagatcgccctgagcaggacttcctcggcattgaagtgcattcaccgggcgttggtgcgtgcctggcttctgcgcatgaagaaggtttaagcaacctgcgcgtgatgtgtcacgatgcggttgaagtgctgcataaaatgattcctgacaattcattgcgcatggtgcagctctttttccctgacccgtggcacaaagcgcgccataataaacgccgtatcgttcaggtgccgtttgccgaactggtaaaaagcaaactgcagctggggggcgtattccatatggcgaccgactgggaaccttatgcggaacatatgcttgaagtgatgtcttctattgacggttataaaaacctgtcagagagcaatgattacgtaccgcgtccggcatcacgtccggtgacgaaatttgaacaacgtggtcatcgtcttggtcacggagtatgggacttaatgttcgagagggtgaaataatggcaaagaaccgtagccgtcgtctgcgtaaaaaaatgcacatcgacgaattccaggaattaggattttcggtggcatggcgattcccggaaggtacatcggaagaacagattgataaaaccgttgatgattttattaacgaggttatcgaaccgaacaaactggcctttgacggcagcggttatctggcctgggaaggtctgatctgcatgcaggaaatcggcaaatgcaccgaagaacatcaggcgattgtgcgtaagtggctggaagagcgcaaactggatgaggtacgcaccagcgaacttttcgacgtttggtgggactaagaaagcatacgggcgatgacaaatgcaaaactgcctgatgcgctacgcttatcaggcctggaaagatgcacgatcgagtaggcgggataaggtgtttacgccgcatccggcatggaaaacgcgtactttgttatcaatctggggccagcaaatgctggcctgattttttcttgagggaagactatgatgcgcaaaatgctgctggcggcagcactttcagtgacggcaatgaccgctcacgccgactaccagtgcagcgtcacgccgcgtgacgatgtgattgtcagcccgcaaaccgtgcaggtgaagggcgaaaacggcaatctggtgatcacgccagacggcaacgtgatgtataacggtaagcaatattccctgaatgccgcccagcgcgagcaggcgaaggattatcaggctgaactacgcagcacgctaccgtggattgatgaaggcgcgaaaagccgcgtcgagaaagcccgtattgctctggataaaattatcgttcaggagatgggcgaaagcagcaaaatgcgcagccgtctgaccaaacttgatgcgcagctgaaagagcagatgaaccgcattattgaaacgcgcagcgatggcctgacgtttcactataaagccattgatcaggttcgcgccgaaggccagcaattagtgaatcaggcaatgggtggaattttacaggacagcattaatgaaatgggcgcgaaagcggtgctgaaaagcggcggtaacccattacagaatgtgctgggaagcctgggggggctgcaatcctcaatccaaaccgagtggaaaaagcaggaaaaagatttccagcagtttggcaaagatgtttgtagccgcgttgtgactctggaagatagccgcaaagccctggtcgggaatttaaaataatcctctattttaagacggcataatacttttttatgccgtttaattcttcgttttgttacctgcctctaactttgtagatctccaaaatatattcacgttgtaaattgtttaacgtcaaatttcccatacagagctaagggataatgcgtagcgttcacgtaactggaggaatgaaatggagtttttcaaaaagacggcacttgccgcactggttatgggttttagtggtgcagcattggcattacccaatatcaccattttagcaaccggcgggaccattgccggtggtggtgactccgcaaccaaatctaactacacagcgggtaaagttggcgtagaaaatctggttaatgcggtgccgcaactaaaagacattgcgaacgttaaaggcgagcaggtagtgaatatcggctcccaggacatgaacgataatgtctggctgacactggcgaaaaaaattaacaccgactgcgataagaccgacggcttcgtcattacccacggtaccgacacgatggaagaaactgcttacttcctcgacctgacggtgaaatgcgacaaaccggtggtgatggtcggcgcaatgcgtccgtccacgtctatgagcgcagacggtccattcaacctgtataacgcggtagtgaccgcagctgataaagcctccgccaaccgtggcgtgctggtagtgatgaatgacaccgtgcttgatggccgtgacgtcaccaaaaccaacaccaccgacgtagcgaccttcaagtctgttaactacggtcctctgggttacattcacaacggtaagattgactaccagcgtaccccggcacgtaagcataccagcgacacgccattcgatgtctctaagctgaatgaactgccgaaagtcggcattgtttataactacgctaacgcatccgatcttccggctaaagcactggtagatgcgggctatgatggcatcgttagcgctggtgtgggtaacggcaacctgtataaatctgtgttcgacacgctggcgaccgccgcgaaaaccggtactgcagtcgtgcgttcttcccgcgtaccgacgggcgctaccactcaggatgccgaagtggatgatgcgaaatacggcttcgtcgcctctggcacgctgaacccgcaaaaagcgcgcgttctgctgcaactggctctgacgcaaaccaaagatccgcagcagatccagcagatcttcaatcagtactaatcacctcgccccggtatcgtgccggggctttttcacttcagacttacgtccattgccaattttcattaccctaatgataatcaccggaataaattattccgcgtgaggtttttcgggtgaaaaagcaatggattgttggcacggcactgcttatgttgatgactggtaatgcctgggcagatggcgaaccgccaactgaaaatatcttaaaagatcaattcaaaaagcagtatcacggcattctcaagcttgatgctatcaccttaaaaaatcttgatgctaagggtaatcaggccacctggtcagcggaaggcgatgtctcttccagtgacgatctctatacctgggtcggtcagttggcagattacgaactgctcgaacagacctggacgaaagataaaccggtaaaattctcggcgatgttaaccagtaaaggaacgcccgcgtctggctggtcggtgaacttttactcttttcaggcggcagccagcgatcgtgggcgggtggtcgacgatatcaaaacgaataataaatatctgatcgtgaatagcgaagatttcaattatcgctttagtcagcttgaatctgcgttgaatacccagaagaactcgattcctgcgctggaaaaggaagtgaaagcgcttgataagcaaatggtggcggcgcagaaagcagcggatgcatattggggaaaagatgcaaacggtaagcaaatgacccgcgaagaagcctttaaaaaaattcaccaacagcgtgatgagtttaataaacagaacgatagcgaggcgttcgcggttaaatatgacaaagaggtttatcaaccggcgattgcggcatgtcataaacagagtgaagagtgttatgaagtgccgattcagcagaaacgagatttcgatatcaacgaacaacggcgacagacttttctgcaatcacaaaaactcagccgtaaattgcaggatgactgggtaacgctcgaaaaagggcaatatccgttaacgatgaaagtttcagaaataaacagtaaaaaagtcgcgattttgatgaaaattgacgatatcaaccaagctaatgaacgctggaaaaaagataccaaacaactgcggcgcaatggggtgattaagtaagtttgatatagtgcacgatttgtagcaggatgcggcgttgaccccgcatccggcaatcaacgtctgatgcgacgcttgcgcgtcttatcagacctacaaccgctgccacatgtcggctggataaggcgttcacgccgcatccggcaatacaagtttactcagccagaaaaagctccagcagcgaatttaaaaacagcttcccatgttccgttatctgccagtaatccgcacattcggtgagataaccctgggcaatcgcctcgtctaactgtgggcgaatcacatcttcgcaaagcccggtatacgcactaaactctgcgcgtggcgcggcctccagcaagcgaaagcggttcataaagaactcaaacggcttatctgcggcttcgacatcacgctggctttccagataccttccttgcataaaaccacgcggatgacgcgttttagtggtacgcagaatgcgcccatccgggaaggtcactttgccgtgcgcgccgcagccaataccgatgtagtcgccaaagcgccagtagttgagattgtgctggcactgataactgggtttggcgtaagcggaagtttcatattgctgataacccgctgcggttaataactgatgcccctgttcgaatatatcccacagcgcgtcgtcgtccggcagcaccggtggtcgcgaaccaaacagcgtattgggttcgatggtcagttgataccaggaaagatgcggcggattcagttcaatggcctggcgtagatcgccaagcgcctcttccagtgattgatccggtagtccatgcatcaaatcaaggttaaagctacgtaaccctaaaccgctcgccagctttgccgctcgtttcgcttcttgcgggccatgaatgcgcccaagtcgtttcagcttttcttcgctaaaactctgcacaccaatagagatgcggttcacaccagcacgctgataatcgacaaagcgatcggcttctaccgtaccagggttcgcttccatagtaatttctgcatccgctgccagcggcaaacgcgcacgcacgccgtccagcagcgtttgcatcgccgggccggaaagcaggctcggcgtaccaccgccaataaagattgtctttacttcacggccctgagcgtaagccacatcattgtccagatcgcaaagcagatgctgaacgtaatcgtcgtgcggcacttctcctttcaacgcgtgagagttgaaatcgcagtacgggcatttctgcacgcaccacgggatgtgaatgtagagactcagcggcggtaatttaaccattacgtaaagcgtccaacagcagtttcaatgcctgaccacggtgggaaatggcgctcttttcttcgcgggtcagttcggcagcggttttcccttcggaaggtacgaagaagattggatcataaccaaagccaccagtgcccgctggttcacgagtaatcacgcccggccagctaccgtggcacaccagcggagtcggatcttccgcgtgacgcagatataccagcacgcagtggaaacgcgcctgacgttggtcgtccggtacgtctttcagtgtttccaacagtttttgcagattcttttgatcggtcgcgtcttcaccggaataacgcgcggagtaaatacccggcgcgccacccagcgcatctaccgccagaccagagtcgtcggcaattgccggtaaaccggtcacttttgccgcatggcgcgctttcagaatcgcgttttcgataaaggtcaggccggtttcttcagcggaatctacgccgaggtctgtttgggccacgatatcaagaccgaagtcgctaagcagcgacgccagctcacgcactttaccggcattgccggttgcgaggacaactttttgcataggatacctaattaattaacgccgcgatttctggcgggatttgttgcggattaatgattttaatttgtttgtggcggccaagttcgcctttttcaattaccacctggcttttggctacccggaattgcttaccgagaaacttcaccagatggctgttggcctggccgtcaaccggcggcgcggtaatggcgactttaacttcgtcgccatgtaaaccgacaatagaatcacggctggctttcggctgaatatagagccgtaaaaccagaccgtcatcattaactgttacggcactcataacgccatccacagccccggcagcagcatgtttccggttgcctgtaatacttctgcgacacccatattgatgacatacagcagcagaacgaggatcatcggcgagaaatcaatcccacccattgccggtagcaggcggcgaatcgggcgcagcagcggatcggccagctgaatcagcacgtattcaatcggactacgaccctggcttacccagctcataatcgccatcaccagcaggacccagaaaatcagcaagccgatggttttcagcagaatcagtaaaccggcaatccagatgattggcaggaaggtcaccactttaaacagcacaatggctttgataaaactgagaatataggcaaccagcagcgaggcgctgtcaatgggacccattgccggaataacgcggcgcagtggcccgataattggctgcgttaccttcactacaaactgtgagaaggggttgtaaaaatcacaatgagcccactgcatccagatgcgtaataacagcaccatggtatacagctcaatgaccgttgaaagcaggaaagtcaacgtattcatggcgttcctttaattccttattttttagagtaatcacgcgcaccaaaaattgcagtgccgatacgaaccatcgtgctacctgccgcaatggcggcttccatatcgtccgacattcccagagagagcgtgtcgatatgcgggtagcgcgttttcagtccggcaaatgctacagccatttggcgtgcaacttcaaactgccttacatattctgactcaggcgcagggattgccatcagcccgcgcagacgtaaacgcggtagttcagcgaccgccgctgccagctcgtccagttctgccagttgaatcccggacttactgttttcatcactaatattaatttgaatcagtacgttaagagggggaagttctgccgggcgctgatcgttgaggcgggtagcaatgcgcaaacggtcgatggtatgacaccagtcgaaatgctctgccaccaggcggcttttattagactgcaacgggccaataaaatgccattctaatcctgttacgcccagttcctgaaagtggcgaattttatctaccccttcctgaacgtagttttcaccaaattgacgctgcccggcatcaatggcttctgcgatggcgctcgcaggttttgttttactgactgcaagcagcgtaatttcttctggagaacggccgcaacgcgttgcagccgctgagattttgtcccggacctgtgccaggttatgcgcaatatcgttcattttccgaggatcttagtatgaatatggaagaaattgtggcccttagtgtaaagcataacgtctcggatctacacctgtgcagcgcctggcccgcacgatggcgcattcgcgggctaatggaagctgcgccgtttgatgcgccggacgtcgaagagctactgcgggagtggctggatgacgatcagcgggcaatattgctggaaaatggccagctggattttgccgtgtcgctggcggaaaaccagcggttgcgtggcagtgcgttcgcgcaacggcaaggtatttctctggcattacggttgttaccttcgcactgtccacagctcgaacagcttggtgcgccaccggtattgccggaattactcaagagcgagaatggcatgattctggtgacgggggcgacggggagtggcaaatctaccacgctggcggcgatggttggctatcttaatcaacatgccgatgcgcatattctgacgctggaagatcctgtggaatatctctatgccagccagcgatgtttgatccagcagcgggaaattggtttgcactgtatgacgttcgcatcggggttgcgggccgcattgcgggaagatcctgatgtgattttgctcggagagctacgtgacagtgagacaatccgtctggcgctgacggcggcagaaaccgggcatctggtgctggcaaccttacatacacgtggtgccgcgcaggcagttgagcgactggtggattcatttccggcgcaggaaaaagaccccgtgcgtaatcaactggcaggtagtttacgggcagtgctgtcacaaaagctggaagtggataaacaggaaggacgcgtggcgctatttgaattgctgattaacacacccgcggtggggaatttgattcgtgaagggaaaacccaccagttaccgcatgttattcaaaccgggcagcaggtggggatgataacgtttcagcagagttatcagcaccgggtgggggaagggcgtttgtgacgttgccatgcccgatgcgcaagcttatcgggcctacaaaggcaataaatgtctgatgcgacgctaacgcgtcttatcagacctacagccgctgccagatgtgtgctggataaggtgttcacgcagcatccggcaaaatggccggatgacggtaacgactatccgccaggcttttaaatcgccttaatatccctgctcgaaatagctttcgagaataataaccgcagaggcagagtcaactttgcctttgttgagcgcccgatagccgccctgttcaaacagaccggaacgggcttccacggtgctaagacgctcgtcatggagctttacttcaacaccgaaacgaccatgaatacggttggcgaatttacgcgctctggcagtcaatggttgctcggtgccgtccatattcagcggcaaaccgacgatgatttcgtccggctgccactctttcagtaaacgctcgataatgttccagtccggcgtaccgtcctgtgctttaattgcaggcaaagggcgagcggtgccggtaatgcgttggccgaccgctacgccaatgcttttggtgccgaagtcgaaggcgagtaaggttccactcatcaggcgtgtcctgccacaccaggcatggtgagaatatccacaccaatcagttttgccgcctcgcgccagcggtcggcaatcggcgttttgaacagaatattcagatctgccggggccgttagccacgcgttatcgagaatttcttgttccagttgacctttctcccaggaggcataacccagagccaccaatacgtcagacggttgtttatcggtgccgagcgtttccagcacatcgcgggaagtggtcattaccgtgttgtctgaaatgcgaatgctggaagcaaaattggagggcggagtatgcaaaataaacccgcgatcttcagccagcggaccgccgagcataaccggtttatccagacggattgattcatcacgcggctccggcgtgatcttcagcttttccagaatcccttcaattttgagattttccagcggcttgttgacgatgatccccattgcaccattggtattatgttcgcaaatgtagaccacggaacgacggaaaatcggatcctggagagcaggcatggcaataagaaagtgatgctgtaaattcattgtcagaggttctgtttcctggttcaaaaaagcaacagcgcccagtatgcgtggaaagaagggcgctgtcactcagagtctcaacgagatccttctcgctaaggtgggttactgctgctgtaaacgtgcttcgatggcatccattaacattccggtgatcgacaccggaaactctgcttcaatctcacgaatacaggttgggctggtgacgttaatttcagtcagacggtcgccgatgatatccagaccaacaaaaatcagccctttttctttcagcgtcggcccgatctgacgggcgattttccagtcactttccgtcagcggacgaggttcaccgcgaccaccggcagccagattgccacgggtttcgcccccctgcggaatacgcgccaggcagtacggtaccggctcgccatccaccaccagcacgcgtttgtcgccatctttaatggctggcaggtaattttgcgccatgcagtagcgagtgccatgctcagtcagggtttcggcaatcacgccgaggtttggatcgccttctttcacgcggaaaatcgacgcgccgcccataccgtccagcggcttaagaatgatgtcgctgtgtttctcccagaacgcttttagctgcgctttattgcgcgtaaccagcgtttctggcgttaagtcagagaaccaggcggtaaacagtttctcgttacagtcgcgcaggctctgcggcttgttaacgatcagcgtccctttctcttcggcacgttccagaatataggtcgcgtagataaactcggtatcaaacggcgggtctttacgcatcaggatcacatcgagatcggccagcggcagatcctgttcaccgacgaacgaaaaccactcttcgtagttctgcttcacgttcagcgtgcgggtatgggcgcgggcttcaccattgatcagatacagatcgcccatctccatatagtgaagttcgtaaccacgacgctgtgcttccagcaacatagcaaaactggaatctttcttgatgttgatgtttgcgatggggtccatcacgatgccgagcttgatcattattcttctccgttagcccaaatcgccaaatcgtacttgtagcgcggtaatggcggtgagcgcagttgtctctgtacgcaaaacgcgaggtcccaacaggatatcagtaaattgatagcgggcagtcatggcaatttcatctgccgataaaccgccttccgggccaatcagcaggcggacgcgttcaaccggtaacggcaacgtattgatgctgttactggcgcgcgggtgaagattcagtttcagtccttcatcctgctctgcacaccaggcttccagatccatcgctggacggatttccggcacccggttacgaccacactgctcacaggcagcaattgcaatcttctgccactgctgaagcttcttgttcagacgttcactatccagtttaacgccgcagcgctcagaaaaaagtggcgtaatgaggcttacaccgagttcgatcgatttctggatagtaaattccattttttcaccacgcgacatcacctgaccgaggtgaatatgcagcggagattcgcgatcgtcgatctggccttccagcaccttcacttccacgctttttttgctggcgctggtaatttcggcgtcaaagacctggttgctaccgtcaaacaattgcaacgcctgccccggccccatgcgcagtacgcgcccgatatggttggcggcatcttcgcaaagcgcgatgtgagaatggctggtcagtggttcaggatgataaatgcgggggatacgcatagttaaaaatccgcgtcgtctccccacgcggttgtacgcgtggggtaggggttaacaaaaagaatcccgctagtgtaggttagctctttcgcgcctggcaagcgcgttgcacatacgggttatgattgccctgcaccttcgcgatgcgttcatcgcgctcgcactcccagtcggtaaccggatacatcttgttccatgcgttgaacagctgcgtttgctggcgagagagtgtcaggttgtattggtcgcgcatatagaagtaggtgcgcgcaatggcaccgcgtgcacgcgctggtggttcggcagctttttctttgaaatcgaccttcatggcgcattgaccgtactggccttcaccgccattccactggctgtacataaagttgccgcgatcgccattcacctcaccgactgacggctgcaggttatgcatatcgctttccatcttgcgatagaccggatctttagcgcagtttttacgtccaccgtcctgccagcactggcgctggtgaccgaactgccaggcgggaacgacatgttcccactctacgcggctggcgcggttttcatttttgcgcacctgatagccgcacgattgcagatcaacaacgccttttttgccctgccagttaattttacatccgcaataaaacgtaccgggcgcgtcagcgtggacttttaccgccgcggctttcgcctgagaaaaactattgataccttcggccaacgccgggccggaaaatgctgcgctcagtaccaccgcagcaatagacaaataacggtacatcacttactccgtgttaaaacgagccagcaacgtagcgaaagttgttttggtatgcaatcagccagatcaggaaagttcctgatagttcagatggttatttcgcaaccagctgttcaccgcagtgaacacagcgatagacggcctcgccacgaactacgcgattatggcggcgtacggtaagctgatgctcctggcacttgcagcggtaggggaaggtgttgcgacgcacggattgcagttcgaactgatgcgtacgacgggcgggaacacccagcacgttttccatcatccacttccactctttgccatgtggcgctacgcggccgaaatgtttccataccagcaaatgtgccagttcgtgcggtaccacttcttcaataaaagcttcactgttttccaacagcaaaacgggattgaggcgaatttcatagctttccagccaggccgttccggcggaggttccgcgctgggtgtaagagagttttggctccgggtagttacgccctagcttcaggttggcctgggcgagtttttcccgcaggcgacgcataacggcctgttggatggcgatagggagacgggatgttttcatagcggcagaggatagagcgaagaaaagatgacttcaagaggtggcttcctccgcgatgggaggaagcttggggagattaatcgtgagcgcctatttcgcgcagtttacgacctttcatcagattacgttcaatatgttccagcgaaacgtgtttggtttccggtaccagccacaatgtcagcaggataaacagtacgttcagagccgcatacacccagaaggtgttggcgttacccagcgtgttgagcatggtcaggaacgttgcgccaacgatcatgttggcaatccagttggtggcagtggagcaggtgatgccaaaatcgcggcctttcagcggctgaatttcggagcacagtacccaaatcagcggaccggcactcatggcaaaaccgacaataaacatcagcagcatggcgatggcgaaatactgcgccgacggagagtgaataccgatatgcatcattgtaccgagtacgcccatgccagcagccatcaccaggaagcccagcgttagcgttggtttacgtccccagcggtcaacaaggccgattgcgataaaggtggcaagtacgttggtcaggccgacaatcacggtcccccacatttgctcggtagtgttggtataacccgccagttcgaagattttcggcgcgtaatacatgatgacgttcatcccggtgaattgctgcattacctgcaacagtacgccaaggaacaccgcgcggcggaagttgctgttctctttaaacagcgcccagccactctgtttaacctgcaaactttcacggatttcatccagttcgcgtttcgcttccgcgctggtgtcacgcaggcgtagcagcacgcgttcggcatcaacaaaacggcgtttggcggcaaaccaacgtgggctgtctggcaggaagaagacaccaatcagcagcaaaattgccgggatgataatcacacccagcatccagcgccatgcaccggtgtagctgaaggcggtatcagaaagataagcaccgaggatcccgatagtgatcatcaactgatacatcgagatcatactgccacgaattttttccggcgcaatttcagagaggtacagcggtgcggtataagaggccacacccaccgccagccccagtagaacgcgggaaagaatcagtacttcaacgtttggcgcagccgcagagaacagcgaaccggcaacaaacaaaattgcgccgatcatcaggctctttttgcgcccgagtttaaaggagagccagccgctgcccaccgcaccgactgccgcaccgaacatcatggagcttacgacccattcttgcgtgtgcgaagtaatctggaattcatctgcaataaacggcagtgcgccagcaattacaccgatatccaggccaaagagtaatcccgccagagcggcaaggaagcagacgaaaaacgtcattgccttgtttgaccgcccctgttttttagcgtcaggcatgatgccctccaatatggttattttttattgtgaattaagataggtgagtacgacgtaaaaagatgtgaagcaaatcacatcagtgtaatcgcttacactaacatttatcttagttatgatttaagtgcatgaaaataattgagttatatcatcatagattaaacgctgttatctgcaattaagactttactgaaaagaaatgtaacaactgtgaaaaccgaataataatatgaaaatattacaaatctttgtctgttgtggttggtgtaatcggtttcagttgtgatgataatctgcggtgaaacgtgatcaggaagaatgatgttattgtgcgggcggtttttttgccggatgcggcgtgaacgcctatccaaaagaaaaaggccagcgcgaggctggcctttgaacgcaggtgaagaaagattacttcagaccggcagcatcgcgcagcagctgcgctttgtcggttttttcccacgggaaatgttcacgaccaaagtgaccgtatgctgcggtttctttgtagatcgggtgcagcagatccagcatctgaatcagaccgtatgggcgcaggtcgaagaactcacgtaccagcagggtcagttgttcagaaggcactttctcagtaccgaaagtttctaccatgatggaggtcggttcagccacgccgattgcgtaggaaacctgaatttcacaacgatcggccaggccagcagcaacgatgtttttcgcgacataacgtgctgcgtaggctgcggaacggtccacttttgatggatctttaccagagaatgcaccgccaccgtgacgcgccatgccgccgtaggtatcaacgataattttacgaccagtcagaccgcagtcacccattgggccaccgataacgaaacgaccggtcgggttgatgaagaatttggtggcagaagtcagccattcagcgggcagaattggcttgatgatctcttccattaccgcttcttgcagcgatttctggtcgatctcttcagagtgctgagtggaaagcacgacagcatcgataccaacgattttgccgtcgtcatactgaaaagtcacctggcttttcgcgtccgggcgcagccacggcagagtgccgtttttacgcacttcagcctgacgctgtaccagacggtgtgcataggtgataggtgctggcatcagcacgtcggtttcattagttgcgtagccaaacatcagaccctggtcacccgcgccctgttccagcggatcggcacggtcaacgccctggttgatgtcaggagactgtttgccgatagcgctcagaaccgcacaggagttagcgtcaaagcccatgtcggaatgcacatagccaatttcgcgaacggtgttacgggtgatctcttcgatgtctacccaggcgctggtggtgatttcgccgccaactaaaaccatgccggtttttacgtaggtttcgcaagcaacgcgtgctttcggatcctgttcgaggatcgcgtctaaaacggcatcagaaatttggtcagcaattttgtcaggatgcccttcagagacggactcggacgtaaaaaggtgttttgccatatttaatatcacctaaagagaatttggttagctcaaactgttgtgtggattttctgtggtagcggatcctaccacgactctgcaggttaaaaacactggcagtctgagtgttaatcggtatggatggattaacatctggatggctattttaggtcaattcttcaccctatttccacttttttttgaatcgtgtctcattctgttaaaaacgtggctggaaatttttcctgacaatgccggcattctgcgtatttatcttttgcaattttctgccattgtggggtataaaacgcggcgcgcggcttaaataaaaagcacacgacgtttctttcatgttgccacttccagccgggttgaaatcagagttttggcttgtgggttcgtcttaacaggcggccgtggaggtgatacgaaataatgaaccgttgtctgctgcttaacctgtctcaccgttctggtgaagattcgttccccgcactctgcatctctgctttgcatacctgccgatgttatacccatctcggcgcttctcaggattcaagagctggttacagttactgaggactgaacaagggcgctcttgtaaaaacaagagttttctcgtggtttcgccgaactttcacacttacgttcggttatgtgcttaataatgttatgaaaaagaaaccggttgcgcagttggagcgtcagcattcactgctggaaaatccatgtgcttatgggttgttatcgcagttccaggctgcgatagtcgttaactgttttacacttaataaaataatttgaggttcgctatgtctgacgacatgtctatgggtttgccttcgtcagcgggcgaacacggtgtactacgctccatgcaggaggttgcaatgagctcccaggaagccagcaagatgctgcgtacttacaatattgcctggtggggcaataactactatgacgttaacgagctgggccacattagcgtgtgcccggacccggacgtcccggaagctcgcgtcgatctcgcgcagttagtgaaaactcgtgaagcacagggccagcgtctgcctgcactgttctgtttcccacagatcctgcagcaccgtttgcgttccattaacgccgcgttcaaacgtgcgagggaatcctacggctataacggcgattacttccttgtttatccgatcaaagttaaccagcaccgccgcgtgattgagtccctgattcattcgggcgaaccgctgggtctggaagccggttccaaagccgagttgatggcagtactggcacatgctggcatgacccgtagcgtcatcgtctgcaacggttataaagaccgcgaatatatccgcctggcattaattggcgagaagatggggcacaaggtctatctggtcattgagaagatgtcagaaatcgccattgtgctggatgaagcagaacgtctgaatgtcgttcctcgtctgggcgtgcgtgcacgtctggcttcgcagggttcgggtaaatggcagtcctccggcggggaaaaatcgaagttcggcctggctgcgactcaggtactgcaactggttgaaaccctgcgtgaagccgggcgtctcgacagcctgcaactactgcacttccacctcggttcgcagatggcgaatattcgcgatatcgcgacaggcgttcgtgaatccgcgcgtttctatgtggaactgcacaagctgggcgtcaatattcagtgcttcgacgtcggcggcggtctgggcgtggattatgaaggtactcgttcgcagtccgactgttcggtgaactacggcctcaatgaatacgccaacaacattatctgggcgattggcgatgcgtgtgaagaaaacggtctgccgcatccgacggtaatcaccgaatcgggtcgtgcggtgactgcgcatcacaccgtgctggtgtctaatatcatcggcgtggaacgtaacgaatacacggtgccgaccgcgcctgcagaagatgcgccgcgcgcgctgcaaagcatgtgggaaacctggcaggagatgcacgaaccgggaactcgccgttctctgcgtgaatggttacacgacagtcagatggatctgcacgacattcatatcggctactcttccggcatctttagcctgcaagaacgtgcatgggctgagcagctttatttgagcatgtgccatgaagtgcaaaagcagctggatccgcaaaaccgtgctcatcgtccgattatcgacgagctgcaggaacgtatggcggacaaaatgtacgtcaacttctcgctgttccagtcgatgccggacgcatgggggatcgaccagttgttcccggttctgccgctggaagggctggatcaagtgccggaacgtcgcgctgtgctgctggatattacctgtgactctgacggtgctatcgtccactatattgatggtgacggtattgccacgacaatgccaatgccggagtacgatccagagaatccgccgatgctcggtttctttatggtcggcgcatatcaggagatcctcggcaacatgcacaacctgttcggtgataccgaagcggttgacgtgttcgtcttccctgacggtagcgtagaagtagaactgtctgacgaaggcgataccgtggcggacatgctgcaatatgtacagctcgatccgaaaacgctgttaacccagttccgcgatcaagtgaagaaaaccgatcttgatgctgaactgcaacaacagttccttgaagagttcgaggcaggtttgtacggttatacttatcttgaagatgagtaagtcctgtgttacttgaatccgcttaatttagcggtgataatccgccacaatttattgtgacaaatccaacccttcctcgtcgggcctaacgacgcggaagggtttttttatatcgactttgtaataggagtccatccatgagcaccttaggtcatcaatacgataactcactggtttccaatgcctttggttttttacgcctgccgatgaacttccagccgtatgacagcgatgcagactgggtgattactggcgtgccgttcgatatggccacttctggtcgtgcgggtggtcgccacggtccggcagcgatccgtcaggtttcgacgaatctggcctgggaacacaaccgcttcccgtggaatttcgacatgcgtgagcgtctgaacgtcgtggactgcggcgatctggtatatgcctttggcgatgcccgtgagatgagcgaaaagctgcaggcgcacgccgagaagctgctggctgccggtaagcgtatgctctctttcggtggtgaccactttgttacgctgccgctgctgcgtgctcatgcgaagcatttcggcaaaatggcgctggtacactttgacgcccacaccgatacctatgcgaacggttgtgaatttgaccacggcactatgttctataccgcgccgaaagaaggtctgatcgacccgaatcattccgtgcagattggtattcgtaccgagtttgataaagacaacggctttaccgtgctggacgcctgccaggtgaacgatcgcagcgtggatgacgttatcgcccaagtgaaacagattgtgggtgatatgccggtttacctgacttttgatatcgactgcctggatcctgcttttgcaccaggcaccggtacgccagtgattggcggcctgacctccgatcgcgctattaaactggtacgcggcctgaaagatctcaacattgttgggatggacgtagtggaagtggctccggcatacgatcagtcggaaatcactgctctggcagcggcaacgctggcgctggaaatgctgtatattcaggcggcgaaaaagggcgagtaagcaccagatgcgatgcgcacgggtaaaacgtgccattaatgtcggatgcggcgtgaacgccttatccgacctacgttcggcacccgtaggccggataagatgcgccagcatcgcatccggcaatgcgcacaaggtaacaaatgtgccattcatgtcagatgcggcgtgaacgccttatctgacctacgttcgacaccaccaggctttacttaatcccatccgcgctcatgcgatcgcgaatatgctgggcgcgttcggcggatgcaggatggtcgtcaaacattgagctttggcgaccttcttccagttttgccagtttttcaaagctggtggcaagacctgccgggctgatgccgcgttggcgcagaagatcgtaagaataatcatcggcttctgcttcctggcgctgggagaattgcgaattgactaatttctcgcccagattaccaagttgtgattgagataaacttccgacaatcccgcccgcagaggccgcagctactcgcacggcatttgtaccaagtgccacctgcattccttttttcacatggcctaacgccacgtgccccatttcgtgaccgatcaccgcttcgacttcgttatccgtcatcatatccatcagcccgctatagacgcggatacagccgttagccattgcaaaggcgttcacatccttcgccatatacactttgtaatttaccggctgaccgttgatattgttgcctagcgcattggcaatagttgtcagacgtttagcgtattcgctattggctggcgcaatagtcgccttgctgtccatctcctgacatgcctgatcgctcagggttttcacctgcgcatcactcaaactgtaagcctgaaaagcttccgctcctgatgagagcagtccgttggagtccatattctggcaaccagtcagtaccgttgccacgctcattgctaccaataaggcgcgaattttcatgttttctcttccgcacaaggtcaggattattctaaaaatgcgccgtttgcaggtgaatcgacgctcagtctcagtataaggaaaagcgcagcggacgggcgagtagattgcgcaacatgcgagcatgatccagagatttctgaagcggcaaaaggatgttccatgtacatgacgcgcggcttgcggtaaattgttggcaaattttccggcgtagcccaaaacgcgctgtcgtcaagtcgttaagggcgtgcccttcatcatccgatctggagtcaaaatgtcctcacgtaaagagcttgccaatgctattcgtgcgctgagcatggacgcagtacagaaagccaaatccggtcacccgggtgcccctatgggtatggctgacattgccgaagtcctgtggcgtgatttcctgaaacacaacccgcagaatccgtcctgggctgaccgtgaccgcttcgtgctgtccaacggccacggctccatgctgatctacagcctgctgcacctcaccggttacgatctgccgatggaagaactgaaaaacttccgtcagctgcactctaaaactccgggtcacccggaagtgggttacaccgctggtgtggaaaccaccaccggtccgctgggtcagggtattgccaacgcagtcggtatggcgattgcagaaaaaacgctggcggcgcagtttaaccgtccgggccacgacattgtcgaccactacacctacgccttcatgggcgacggctgcatgatggaaggcatctcccacgaagtttgctctctggcgggtacgctgaagctgggtaaactgattgcattctacgatgacaacggtatttctatcgatggtcacgttgaaggctggttcaccgacgacaccgcaatgcgtttcgaagcttacggctggcacgttattcgcgacatcgacggtcatgacgcggcatctatcaaacgcgcagtagaagaagcgcgcgcagtgactgacaaaccttccctgctgatgtgcaaaaccatcatcggtttcggttccccgaacaaagccggtacccacgactcccacggtgcgccgctgggcgacgctgaaattgccctgacccgcgaacaactgggctggaaatatgcgccgttcgaaatcccgtctgaaatctatgctcagtgggatgcgaaagaagcaggccaggcgaaagaatccgcatggaacgagaaattcgctgcttacgcgaaagcttatccgcaggaagccgctgaatttacccgccgtatgaaaggcgaaatgccgtctgacttcgacgctaaagcgaaagagttcatcgctaaactgcaggctaatccggcgaaaatcgccagccgtaaagcgtctcagaatgctatcgaagcgttcggtccgctgttgccggaattcctcggcggttctgctgacctggcgccgtctaacctgaccctgtggtctggttctaaagcaatcaacgaagatgctgcgggtaactacatccactacggtgttcgcgagttcggtatgaccgcgattgctaacggtatctccctgcacggtggcttcctgccgtacacctccaccttcctgatgttcgtggaatacgcacgtaacgccgtacgtatggctgcgctgatgaaacagcgtcaggtgatggtttacacccacgactccatcggtctgggcgaagacggcccgactcaccagccggttgagcaggtcgcttctctgcgcgtaaccccgaacatgtctacatggcgtccgtgtgaccaggttgaatccgcggtcgcgtggaaatacggtgttgagcgtcaggacggcccgaccgcactgatcctctcccgtcagaacctggcgcagcaggaacgaactgaagagcaactggcaaacatcgcgcgcggtggttatgtgctgaaagactgcgccggtcagccggaactgattttcatcgctaccggttcagaagttgaactggctgttgctgcctacgaaaaactgactgccgaaggcgtgaaagcgcgcgtggtgtccatgccgtctaccgacgcatttgacaagcaggatgctgcttaccgtgaatccgtactgccgaaagcggttactgcacgcgttgctgtagaagcgggcattgctgactactggtacaagtatgttggcctgaacggtgctatcgtcggtatgaccaccttcggtgaatctgctccggcagagctgctgtttgaagagttcggcttcactgttgataacgttgttgcgaaagcaaaagaactgctgtaattagcatttcgggtaaaaaggtcgcttcggcgaccttttttattaccttgatatgtccgtttgcggacaagcaatagataaggcgtgttgtagatcacaaatatttatatgcaataaatatcaattatgtaatatgcatcacgatatgcgtattgacatttgttgttatatctataactcaatgttatataagaaattaataattcactgttttcaaaacaccggtttccctgctcaattgctttcattaaaccgcacgagtattttatttttaccgccggacggtaccctaaaaataaaataaggataatttatgcggcttagtgattattttccagaatcatcaatctcagttatacattcagcaaaagattggcaggaagctatcgatttctcgatggtatcattgctggataaaaactatatcagcgagaattacattcaggcaattaaagattccaccattaacaatggcccttattatattctcgcaccaggcgtggcaatgcctcatgcgcgaccggaatgtggggcgcttaaaaccgggatgtctttgacattacttgaacaaggtgtttattttccggggaatgacgaaccaattaaattactcatcggactctctgctgccgatgccgattcgcacattggcgctattcaggcgttaagtgaattactgtgcgaagaagaaatactcgaacaactcttaacagcatcatcagaaaaacaattagcggacattatcagccgcggataattactctctcctctacaggataatattatggaaaacaagtctgctcgtgcaaaggtccaggcttttgggggctttttgactgcaatggtcatccccaatattggtgcttttattgcctggggttttattactgcgttatttattcccaccggttggctgcctaacgaacatttcgccaaaattgtcggcccgatgattacctatttattgcccgtgatgattggttctacaggtggtcatctggtcggcggtaaacgcggggcggtcatgggcggaataggtactattggtgtgatcgttggcgcagagatcccgatgttccttggctcaatgatcatggggccgctcggtgggttggtcataaaatatgtcgataaggcactggaaaaacgcatacctgccggttttgagatggttatcaataacttctcattaggtatcgcggggatgctcctttgtctgctgggttttgaagttatcggcccggcggtgttaattgccaatactttcgtcaaagagtgtattgaggcgctggtacatgcgggttatctgccattgttgtcagtcatcaatgaaccggcgaaagtgcttttcctcaataatgcgatcgatcagggcgtctattatccgctgggaatgcaacaggcttcggttaacggtaaatccatcttctttatggtggcctctaacccaggtccgggcctggggctgctgctggcgtttaccttgtttggtaaagggatgagtaaacgttctgcgcccggggcgatgattattcacttcctcggtgggatccacgaactgtatttcccgtatgtgctgatgaagccgctgaccattattgccatgattgcgggcggtatgtctggcacctggatgtttaacttactggacggtggtctggtggctggcccaagtccggggtctatctttgcttacctggcactgacgccgaaaggctcgttcctggcgacaattgccggtgttacggtaggtaccctggtgtcctttgctattacttcgctgatactgaagatggaaaaaacggtggaaacggagagcgaagatgagtttgctcagtcagccaatgcggttaaggcgatgaaacaagagggtgcattctcgttaagcagggttaagcgtatcgcctttgtttgcgatgcggggatgggctccagtgcgatgggcgcgaccaccttccgtaaacgcctggaaaaagcggggctggcaattgaagtaaaacattacgccatagaaaacgtgcctgcggatgcggatatcgtcgttactcatgccagtctggaagggcgcgtgaaacgtgtgacggataaaccactgatattgattaataactatattggcgatccaaaactcgacactttatttaatcaattaaccgccgaacataaacactgattacagaggtaaaaatgaaaaccaaagttgctgctatttatggcaagcgggatgtccgtctgcgcgtatttgaactgccagaaattaccgataatgaattactggtgagtgtaatttctgacagcgtctgtttatcgacctggaaagcggcgttactcggtagtgaacataaacgcgtacccgacgatttagaaaatcatccagtcattaccgggcatgaatgtgccggggttattgtcgaagtgggtaaaaatctcactggcaaatataaaaaaggtcagcgttttgtattgcaaccggcgatggggttaccaagcggatattcagcgggctacagctacgaatattttggcggcaatgccacttatatgattattcccgaaatcgccattaatttgggctgcgtattaccgtatcacggctcttattttgctgcggcgtcgctggcagagcctatgtgctgcattattggtgcttatcatgccaattatcacaccacgcaatatgtttatgagcatcgcatgggcgtcaaacctggcggcaatattgcactgctggcgtgtgcaggtccgatgggcattggcgctatcgattacgccattaacggcggcatacaaccgtcgcgggtggtggtggtcgatatcgacgacaaacgtctggcgcaggtacagaagctgctgccggtggaactggcggccagtaaaggcattgagctggtgtatgtgaataccaaagggatgagcgatcctgtccagatgctgcgggcgctgacaggagatgccgggttcgatgacatttttgtttatgcggcggtgcctgctgtcgttgagatggctgatgaattactggcggaagatggctgtctgaacttctttgccgggccgacggataaaaacttcaaagtgccgtttaatttctacaacgtccattacaacagcacgcacgtcgtcggtacatctggcggttcaacggacgacatgaaagaggcgattgcccttagcgccactgggcagttacagccgtcgtttatggtgacccatatcggtggcctggatgcggtgccagaaaccgtgctcaatctgccggatatccctggcggtaaaaaactcatttataacggcgtgaccatgccgctcactgccattgccgattttgccgaaaaaggcaaaaccgatccgctgtttaaagagttggcgcggctggttgaggaaacgcacggcatctggaatgaacaggccgagaaatatctgctggcacaatttggcgttgatatcggggaggccgcgcaatgatgtccctggcgtggccattatttcgcgttacggaacaggcagcgttggctgcctggccgcaaaccggatgtggcgacaaaaataaaattgatggcctggcggtcaccgcgatgcgccaggcattaaacgacgtcgcttttcgtggacgagtggttatcggcgaaggagaaattgaccatgcgccgatgctgtggattggcgaagaggtgggcaaaggcgatgggccagaagtcgatatcgcggttgatcccattgaaggcacgcggatggtggcgatggggcagagcaatgcgctggcggtcatggctttcgcccctcgagatagcctgttacatgcgcccgatatgtatatgaaaaagctggttgttaatcggctggcggcgggcgcgattgatctgtctttgcctctgacggacaacctgcgcaacgtggcgaaagcgttaggcaaaccgctggataagctgcgcatggttacgctggataaaccgcgcctgagtgccgcgattgaggaagcaacacagctgggcgtgaaggtttttgccctgccggatggcgatgtcgccgccagcgtgctgacctgctggcaggataatccttacgatgtgatgtacaccatcggcggtgcgccagaaggcgtgatttctgcctgtgccgttaaagcattaggcggggatatgcaggccgagctgattgacttttgccaggctaaaggggattacacggaaaatcggcagattgcagagcaggagcgcaagcgttgcaaggcaatgggcgttgacgttaaccgtgtgtactcgctcgatgaactggtgagggggaacgatatcctctttagcgctacgggcgtgacgggcggtgagctggtgaacggtatccaacagacggcgaatggggtgcggacgcagacattactgatcggcggcgcggaccaaacgtgtaatataatagactccctgcattgatggtgatctatcggaagaccaatggcgacgctgacagaagatgatgtgcttgagcaactggatgcacaggacaatttattttcatttatgaaaactgcgcataccattttgctccaggggatacgccagtttctgccgtcgctgtttgtcgataacgatgaagagatcgtggaatatgcagtgaagccgttactcgcccaaagcggcccgcttgacgatattgatgttgcactgcgtttgatttatgcgttggggaaaatggataaatggttgtacgccgatatcacgcatttttcccagttctggcattacctgaacgaacaggatgaaacgcccggatttgccgatgacatgacctgggattttatcagcaacgtcaatagcataacccgcaatgcgatgctctatgacgcgttaaaagcgatgaagttcgctgatttctccgtctggtcagaggcgcgttttagcggaatggtcaaaacggcgctgacgctggcagtaacgaccaccttaaaggaattaacgccgtgaaaattgaattaacggtgaatgggctgaagatacaggcacagtaccagaacgaagagattgaaaatgtacataaaccgttgctgcacatgttggcggccttacagacggtaaatccgcagcggcgtacggtggtttttctttgcgctccgccggggacgggtaaatcaaccctaaccaccttctgggaatatctcgcgcaacaagacccggaactgcccgctattcagacgctcccgatggatggttttcaccattacaatagctggctggatgcgcatcaattgcgccccttcaaaggcgcaccagagacatttgacgttgcgaaactgacggaaaatctgcgccaggtcgtggaaggggattgtacgtggccgcagtacgatcgacaaaagcatgatcctgttgaagatgcgttgcacgttaccgcaccactcgtcatcgtcgaaggaaactggttgttactggatgatgaaaagtggctggagttggcatctttctgcgatttttctatttttattcatgcacctgctcaaattctgcgggagcgcttgattagtcgtaaaattgcgggaggattaacacggcaagtagccgaagcattttatgcccgcaccgatggccccaatgtcgagcgtgtgctgatgaatagccgtcaggccaatctgatagtagagatgactgaagaaggccggtatcacttcacaagctgacaatttattccagttattgtagggttattattacgccagcctggaataaagcttcccacaaaaggggataaaagtgtgatgtgagtcagataaatgtcttcttcggctggacaaacattccttttattccacgtttcgcttatcctagctgaagcgtttcagtcgattaaatgttcgacaattaaccaatcagtcgcagtttgcgacaggtaaggtttccccggacgatttgctggattactctgtctggcaaatttgctcagggaaaaccttgcaggagatctatgaccgtacgcgtagcgataaatggcttcggtcgcatcgggcgtaatgtggttcgtgctttgtatgaatccggacgccgggcggaaattaccgtggtggcaatcaacgaactggcggatgctgcgggcatggcgcatttgttgaaatatgacaccagccatggccgttttgcatgggaagtacgacaggaacgcgatcaactttttgttggtgatgacgccatccgcgtattgcatgaacgttcactgcaatcgctcccctggcgtgaacttggcgttgatgtagtcctcgactgcaccggcgtatatggctcccgcgagcatggcgaagcgcatattgccgccggggccaaaaaagtgctcttttcacatcctggcagtaacgatctcgacgcgaccgttgtttacggcgtcaatcaggatcaacttcgtgcggaacaccgcatcgtttctaacgcttcctgtaccacgaattgcataattcccgtcatcaaattgttagatgatgcgtacggtattgagtccggcactgtgaccacaattcactccgccatgcacgatcaacaggttattgatgcataccatcctgacctgcgtcgcacccgggcagccagccagtcgatcattccggtcgatactaaactggccgccggtatcacacgattttttccgcaatttaacgatcgctttgaagcgattgcggtacgtgtgccaaccataaatgtgacggcaatcgatttaagcgtgacggtgaagaaacctgtaaaagccaatgaagtcaacctgttgctgcaaaaagcagcacaaggtgcatttcatggtatagttgactatacggaattgccgttggtctctgtagattttaaccacgatccgcacagtgccattgtcgatggcacccaaacccgggtcagtggcgcacacctgatcaaaacgttggtctggtgcgataacgaatggggctttgctaaccgaatgctcgacacgacgttagctatggctactgttgctttcaggtaagacgcaagcagcgtctgcaaaacttttagaatcaacgagaggattcaccatgtctgtaattaagatgaccgatctggatcttgctgggaaacgtgtatttatccgtgcggatctgaacgtaccagtaaaagacgggaaagtaaccagcgacgcgcgtatccgtgcttctctgccgaccatcgaactggccctgaaacaaggcgcaaaagtgatggtaacttcccacctgggtcgtcctaccgaaggcgagtacaacgaagaattctctctgctgccggttgttaactacctgaaagacaaactgtctaacccggttcgtctggttaaagattacctcgacggcgttgacgttgctgaaggtgaactggttgttctggaaaacgttcgcttcaacaaaggcgagaagaaagacgacgaaaccctgtccaaaaaatacgctgcactgtgtgacgtgttcgtaatggacgcattcggtactgctcaccgcgcgcaggcttctactcacggtatcggtaaattcgctgacgttgcgtgcgcaggcccgctgctggcagctgaactggacgcgctgggtaaagcactgaaagaacctgctcgcccgatggtggctatcgttggtggttctaaagtatctaccaaactgaccgttctggactccctgtctaaaatcgctgaccagctgattgttggtggtggtatcgctaacacctttatcgcggcacaaggccacgatgtgggtaaatccctgtacgaagctgacctggttgacgaagctaaacgtctgctgaccacctgcaacatcccggttccgtctgatgttcgcgtagcaaccgagttctctgaaactgcaccggctaccctgaaatctgttaacgatgtgaaagctgacgagcagatcctggatatcggtgatgcttccgctcaggaactggctgaaatcctgaagaatgcgaaaaccattctgtggaacggtccggttggcgtgttcgaattcccgaacttccgcaaaggtactgaaatcgtggctaacgctatcgcagacagcgaagcgttctccatcgctggcggcggcgacactctggcagcaatcgacctgttcggcattgctgacaaaatctcctacatctccactggcggcggcgcattcctcgaattcgtggaaggtaaagtactgcctgcagtagcgatgctcgaagagcgcgctaagaagtaaaaaatcacagggcagggaaacctgcccttgtttcagcgcgcttttagagcacgcaatttttcatactctaaataattcgagttgcaggaaggcgacaagagagtgaatccccaggagcttacataagtaagtgactggggtgagcgaacgcagacgcagcacatgcaacttgaagtatgacgagtataaggcccgacgatacaggacaagagacatgtctaagatttttgatttcgtaaaacctggcgtaatcactggtgatgacgtacagaaagttttccaggtagcaaaagaaaacaacttcgcactgccagcagtaaactgcgtcggtactgactccatcaacgccgtactggaaaccgctgctaaagttaaagcgccggttatcgttcagttctccaacggtggtgcttcctttatcgctggtaaaggcgtgaaatctgacgttccgcagggtgctgctatcctgggcgcgatctctggtgcgcatcacgttcaccagatggctgaacattatggtgttccggttatcctgcacactgaccactgcgcgaagaaactgctgccgtggatcgacggtctgttggacgcgggtgaaaaacacttcgcagctaccggtaagccgctgttctcttctcacatgatcgacctgtctgaagaatctctgcaagagaacatcgaaatctgctctaaatacctggagcgcatgtccaaaatcggcatgactctggaaatcgaactgggttgcaccggtggtgaagaagacggcgtggacaacagccacatggacgcttctgcactgtacacccagccggaagacgttgattacgcatacaccgaactgagcaaaatcagcccgcgtttcaccatcgcagcgtccttcggtaacgtacacggtgtttacaagccgggtaacgtggttctgactccgaccatcctgcgtgattctcaggaatatgtttccaagaaacacaacctgccgcacaacagcctgaacttcgtattccacggtggttccggttctactgctcaggaaatcaaagactccgtaagctacggcgtagtaaaaatgaacatcgataccgatacccaatgggcaacctgggaaggcgttctgaactactacaaagcgaacgaagcttatctgcagggtcagctgggtaacccgaaaggcgaagatcagccgaacaagaaatactacgatccgcgcgtatggctgcgtgccggtcagacttcgatgatcgctcgtctggagaaagcattccaggaactgaacgcgatcgacgttctgtaagatattcctttctgcttatctcaaggcccgctctgcgggtctttttttcgccaaaagcaaaattgcctgatgcgctacgcttatcaggcctacacgtatcctgcaatatattgaatttgcaggtttttgtaggccggataaggcgttcacgccgcatccggcatgacaaagcgcacattgatatctgtctgagccccgctctgcggggattttttcgccaaaagcaaggtgattcagatgagaaatctgtgatctatttggcaaaattatgctttattgtttacccttgtcagactgcccgtcataaggcggcggagtgtatttctccattttgagtcagttgaaaaggaatattgaatggaagatttgaatgttgtcgatagcataaacggcgcgggaagctggctggtagctaaccaggcgctgctgctaagttatgcagtaaacatcgtggcggcactcgcgatcatcatcgttggtttgattatcgcgcggatgatttccaacgcggtgaatcgcctgatgatctcccgtaaaatcgatgccactgttgctgattttctttctgcattagtccgttacggtattatcgcctttacgctaatcgctgcactgggacgcgtgggtgtacaaaccgcgtcagtcattgctgtactcggtgccgcaggcttagctgttggtctggctttgcaggggtcactgtctaacctggccgctggcgtgttacttgtcatgttccgcccgttccgtgccggagaatatgttgacctgggcggcgtagccggtactgtgctgagtgtgcagattttctccaccaccatgcgtactgcagacggtaaaattatcgttattccgaacggtaaaattattgccggaaatattattaacttctcccgcgagccagttcgccgtaacgaatttattattggcgtggcgtatgattccgatatcgatcaggttaagcagatcctgaccaatattatccagtctgaagatcgcattttgaaagatcgcgaaatgactgtgcgcctgaacgaacttggtgcatcgtcgattaatttcgtggtccgcgtctggagcaacagcggcgatctgcaaaacgtgtactgggatgtgctggagcgtattaaacgtgaatttgatgccgccggtatcagcttcccgtacccgcaaatggatgtgaactttaagcgggtgaaagaagacaaagctgcgtaatcaacgctgaggccagataatactctctggcctctctcttattagtttttctgattgccaattaatattatcaatttccgctaataacaatcccgcgatatagtctctgcatcagatacttaattcggaatatccaacgtgttttcttattactttcaaggtcttgcacttggggcggctatgatcctaccgctcggtccacaaaatgcttttgtgatgaatcagggcatacgtcgtcagtaccacattatgattgccttactttgtgctatcagcgatttggtcctgatttgcgccgggatttttggtggcagcgcgttattgatgcagtcgccgtggttgctggcgctggtcacctggggcggcgtagccttcttgctgtggtatggttttggcgcttttaaaacagcaatgagcagtaatattgagttagccagcgccgaagtcatgaagcaaggcagatggaaaattatcgccaccatgttggcagtgacctggctgaatccgcatgtttacctggatacttttgttgtactgggcagccttggcgggcaacttgatgtggaaccaaaacgctggtttgcactcgggacaattagcgcctctttcctgtggttctttggtctggctcttctcgcagcctggctggcaccgcgtctgcgcacggcaaaagcacagcgcattatcaatctggttgtgggatgtgttatgtggtttattgccttgcagctggcgagagacggtattgctcatgcacaagccttgttcagttaggcgctatctgatggaaaaataaaacagaggcgctaagcttgcctccagaggtcctgaattttgggcaagtcaattaacacggagagactaacgtgaagttcaaagttatcgccctggcggcattaatgggtattagcgggatggcagcgcaggctaacgaattgccggatggaccgcatattgtcacctccggtacggcaagcgtggatgcggtgccagacattgccactcttgcgattgaagttaacgtggccgcgaaggatgccgctactgccaagaaacaggcagatgagcgcgtcgcacaatacatttccttccttgaactcaatcagatcgcgaaaaaagatatcagctcagcgaacttacgcacccagccagattatgattatcaggatggtaaaagtatccttaaaggctaccgcgctgtgagaacggtggaagtcacgctccgtcagttagacaaactgaattccttgctggatggcgcgctgaaggcgggtcttaacgaaattcgttctgtgtcgctgggcgtggcgcagccggatgcctataaagacaaagcgcgtaaggcagcgattgataacgcgattcatcaggcgcaggaactggcgaacggctttcatcgtaaactggggccggtatatagcgtgcgctaccatgtttccaactatcagcccagcccaatggtgcggatgatgaaagccgatgccgcgccggtgtccgcccaggaaacttacgagcaggccgctattcagtttgatgatcaggtcgatgtggtcttccagttagaacctgtggatcaacaacccgctaaaacacctgcagcacaataatatttgtagcccgacgtattcgtcgggctaatgcctttacccgatattgcctcctttttctgtaattttctgtaaaaccatgacgtaatcacctatctttgctcgcggtttcatcaaggataggctgactgaaacggttaagcggacaaggatgcgggggagggggatggacatttttatttcgaaaaagatgcgcaatttcattttattagcgcaaaccaataatattgcccgggcggcagaaaaaatccatatgacggcttcgccatttggtaaaagcattgccgcgctggaagaacaaattggctatacgctatttacccgcaaagataataatatcagcctcaataaagccggacaggaactgtatcaaaaactgttcccggtttatcaacggctttctgcgattgataatgaaatccataactcagggcgtcgttcacgagaaattgtgattggcatagataatacttatccgacaattattttcgatcagttgattagtctcggagataagtatgaaggcgtgaccgcccagccagttgagttcagcgaaaatggcgttatcgataatctttttgaccgccagttagattttattatctccccacagcatgtatctgcacgagttcaggaactggaaaacctgactatcagtgaactaccaccgctgcgattaggctttctcgtttctcgccgttatgaagagcgacaagagcaagagctgcttcaggagctgccctggctacaaatgcgctttcagaaccgggccaacttcgaagcaatgattgatgcgaatatgcgaccttgtgggatcaatccaaccattatttatcgtccctacagttttatggccaaaatcagcgccgtggagcgcggacattttctgacggtgatcccgcattttgcctggcgactggtgaatccggcaacgctgaaatattttgatgcaccgcacaggccgatgtatatgcaggaatatctttattcaatcagaaatcatcgttataccgccacgatgcttcagcatattgctgaagatcgtgacgggacgagtcattaacccagcatcgagccggttgcaattaaattacggtgtaagtcgaagacgtggctaagatcgtggtgaatatgtccgccaggcgcattttccagatagcgatgcagataatcccgatacataggatgtgcacaattatcaatgatagtgcgggcgcgttgaagcggggaaagaccgcgcagatcggcgatcccttgttcggtgatgatcactttgacgctgtgttcgctgtgatcaacatggctgcacattggcacgacggttgagatcttgccttctttagcaatcgacggggccataaagatcgacagatacgcgttgcgttcaaaatcaccgctgccgccgatgccgttcatcagatcgaccccggctacgtgtgttgagttggcatgcccgtaaatatcaaactccaggccgacgttcagagcgatgacgcccagacgacggatgatttccgggttattggaaatctcctgcggacgcaacacaatgcggctggcaaagtaatccatattgtcgtaaatcttgcgcagggaatcggccgagattgtcaggctggaggcgctggccccgctgattttgccggtttccagtaaatgcaccaccgattcctgtagcacttccgaatacatcataaacggaggaattaccgggttttcccccagacgcgccattaccgcattattgatattgcccacgccactttgcagcggcagaaattccggcggaatacgcccatgcgccatttcctgcaataagaacgtgaccacgttatcggcaatctgctggcacatgggattttgcttatccagcatattaccggcgtcgggcaagttggtttccacgacggcgacaatctttttcggatcgatttgcacatagcgggtaccgacgcgatccattgcatggaagatcgacacgctattgcgccgcggtggcgcgccaggaatcacaatatccgccacttctgcaacgcgcggatcgtgatagtgattgagttcaatgatcactttcttcgcccgcagcagccaggtcggcgcattaccgatcccgctggttaaccagactcgaccatccggtgccagtgccgatgcttcaatgacggcaacatcaatgtcgccgaagaaaccgtaattgaccatttgcgccacttcgctcaaatgcaggtcaacgaaactcaccgcgccctgattgatctttttacgtaaaccggacgatgtttgatatggcgcacgccaggaaacagcatcggcgtcagaaagtacatcgtcagcggcggcgctgattgacgcacccgtcagaaggcgaatttgatacggctttttggcctcatgctgttcgttagctctgcgggcaatcgcggtgggtagggctttcggcgaacccgccggggtaaagccgctaaatgccaccatgtcgttatgctggataatttctgccgcttcattggcggtcatccttgtccactgagtttccatttttactccttcgttcgcagggattaatgaccaacgaaattaggtttacgtttttcgaggaaagcgttcatcccttcctggtaatcttcgctgtcatacaccgcgcggcgcatcccctgaatacgttcaaattcatcggagttcatggtgtgtgcttcgcccagtacacgcagctcttctttgataacggcaatggctaacggcgctttctcagagatgtggtgcgccatttgtaaggtgaaatcttccagttcttccacttccacaacatggttgaggatgccgacagccagcgcgcgctgggcggtgattggcgaagcggtaaaaatcagctctttgacaatgtggaagcccgcgtcgcgggtcaggttgtgaatgccgaccaggttatacgggacgccgaggtttacaggcgtcattgagaaggttgaggtactggcggcgatgatcagatcggaactcatgatcatttcaaatgcgccaccccaaacactaccttccaccatcgaaatgatcggtttcgggaatttttggatcatgcgggtgatttgacgcaatggatcatcataggagagcggatcgcgaccgccagacggcagttcgtgaatatcgtgacctgcggagaagactttggatccactcggtgcgcgcaaaatgatacagcgaatttccggccggttgagatcgcttaacgcctgcataagatcatcaataaagactttacttaaggcattaagttttcggccatagttaaactcaatgaccgccactttgttgatagtgacaacgttaacatactgataagacataaaaattcctttaatcaaaatattgcgtctggataaattcactgagctgccgcaggccggtgcgcggtgagagcgtattgtttttgaccgctaaaagcgtctggcggtaatagcgatcgaaatcttcattcgcgaacaggtgattcagtacttcttcttcggtctgcttacgcagccattccaccgattgttgttgccgcacttgttgtaaacgaccactggcagttagcgcggttttgaagtcgatgatggcgtgccagatctcatcgattccacgtttttccagtgcgctacaagtcagaacccgtggctgccattcgtcgtatttacgtcgcagaatatgcagggcactctcgtacatatgccgggcaatggcgacattggtatggttatcgccatcgtctttgttgataacgatcagatcagccacttccatcagcccttttttaatgccctgcagatcatcgccgccaccggcaatttgcaacgagataaaacagtccaccatgcgggcgacttctgtttccgactgcccgacgccaaccgtttcgacaatcactacgtcataacccgctgcttcgcataacagcattaattcccgcgctcgctgactggcaccgcccagatgaccggaggatggtaccgggcgaataaacgccgcttcggcacgcgccaggtcattcatgcgggttttatccccgagaatgctaccgccagtgaccgggctgctgggatcgaccgcaataaccgcgacctttaatccctctcgaatcaacaacatgccaaaggcctcaagaaaggtacttttccccgcgccgggggtgccggtaacgcccagtcgcagggtgttaccgcagtacggcataatggcatcaagcagctgcgtacttagtgcctgatgacgcgggtgacggctttccaccagcgtcatggcctgggcgagtgtggcacgctcaccctgacgtaagcggcgaatactttctgccagcgtggcttcattaatcatgatgctggcttatcagattcagtacgtcgcgcacactgtcgagcataggtgtacctggaccataaatcgccgccacgccgcgctcttgcaggaaggcgtaatcctgcggcggaatgacgccacccgcgaccacgcagatatcttcgcgtccccattttttcagcgcttcgaccagttccgggatcagcgttttatgaccggcagccagtgaggatgcgcccactacgtgaacgtcgttttctacggccaggcgggcgatctcttcaggtgtagagaacatcgggcttaaatctacgtcgaaaccgagatcggaataggcgctggcgatcactttcgcgccgcgatcgtgtccatcctggcccatcttagcgatcagaatgcgcgggcgacgaccattgtcggcaaggaactgctccgtttgcgcaacaatggcatcgaactcggaggccgatttctcagactgatgatagctttgcgcaatcacgccggtaacacactggcttggcaccagataacggtcgaaagcgacttccagcgcatcggaaatttcacccagggtggcgcgaacgcgagcggcattaacagcggcagccagcaggttttcgttatgctgtgcggcgtgagtcagggcgttcaacgcggcggttacggcggcatcatcacgggtggcgcgaatgcgttccagcgaagcaatttgctcgttacgcaccatcacgttgtcgatctcaagtacatcggtttcgtcttcgtgatccagtttgtacttgttgacaccaacgatgacacgcttgccctggtcgatcagcgactgttcgcgcgctgaggcctcttcgatcattcgttttggcagacctgcttcgatcgctttcgccatgccaccggcttcgtcgatctgttggataatagctctggcttgtttgacgatttgatcggtcagcgactcaatgtaataggatccggccagtggatcgacggtgcggcagagttctgattcttcctggatgatgatctgggtgttgcgggcaatgcgtgctgagaaatcggtaggcaaaccaagcgcttcgtcaaaggcgttggtatgcagtgactgagtaccgcccagcgtcgcagccagcgcttcaatggtggtgcggataacgttgttatacggatcctgttcagtcaggctccagcctgaggtctggcagtgggtacgcagcgccagtgatttcgggtcctgtgcgccaaatccactgaccgcttcgctccataaataacgtgccgcacgcaacatggcgacgttcataaacagatccatgccgatgccgaagaagaacgacaggcgaggagcgaagtcatcaattttcagtccggcagagattgctgctttgatgtactcaatcccatcagcgagcgtaaatgctacctgctgcacgcagttggcacccgcttcacccatgtggtaaccgctgatactgatggtattaaatcgcggcatgttgccggaacaccaggcgatgatgtcggcgataatgcgcattgacggttttggtgggtaaatataggtgttgcggcagaggtactctttgagaatatcgttttgaatggtgccggtcagtttatcaggtgtaacaccttgctcttctgcggcgacgatataaaacgccagtactggtagcactgcgccattcatggtcatcgaaaccgacattttatccagcgggatctggtcgaacaggactttcatatcttccacggtgtcgatagcgacgcccgctttgccgacgtcgcccgccacgcgcgggttatcggagtcgtagccacggtgggtggcaaggtcaaacgcaacggaaagacctttttgcccggcggccaggttacggcgataaaaagcgttggactcttttgctgttgaaaaaccagcatactgacggatggtccacggttgggcggtatacatagtggcacgcgggccacgaacgtagggcggcaaaccaggaagggtacctgtcacctccagattatcgagatcggcttcggtatacagcggcttgatggcgatcccttccgcggtttgatgaaccagcgagtcgacagttttctcccgacggctcaattccttgttggcaagctgttgccactcctgcacgttagacattatttgctccgtaaaacgcaatcaaaatgagggtatttgcgcctacggtgagctttttacgtgggtttgtcgccagcaaaaaaaatgcattcagacgtcgttttttgccgcctgagatttgtctattttgtgatgtgattcaaggaatacaaaaagaagtgaggacaacgcctgatatgtgctatcaggcattatttgatggattaatcctgacgaaggactttgtgaccataatcgagtaaggcatcagtgactttacgcatcatgcggctttcaggagcaaagcggtgccagtagagcatccgtcgttgaaatagcccaggcgttaagtcaatcagttcaccgctggccagctctttctcgatttgcaggtgcgggatcatacagcaggtggtgccctggcgagcaagttgtacgaacgcttctgaagaattaacgatatggcagggcacgctgcctggaggcagatcgaagttttgctgcaaaaaggcctggtgcatatcgtcaagatggtcaaacgcgaccactggcgctttcagtaatgccgaacgcgttacgccgttagggaaatatttttcggcaaagggttttgagctgacgaacagatagtcgagcgcaccaagtttatcgacaagacaactcggcagcgcctgatgttgaatactcaccgcgccgaccacttcgccgcggcgcagacgttcctgagtgcgggtttcatcttctacctgcaagttgaggcggataggcgaatcagccaacacaggagccagtgcaggaagcaaccacgtcgccagactgtcggcgttgaccgccagtgaaagcagcagcggagtcgaaccggtttgttcatcgcccagccactcttcttccagcaactccacctggcgcagcagtgccagcagtttttgcccttgttccgtcgggcgcggcggtacggtacgcaccaacagcggctgcccgaacatattttccagttgcttaatgcgctgtgagacggctgattgtgtaatgcacagcttttgtgccgcgcgctcaaatcctcgttcacgtatcaccgcatccagtgcctgtaatgttctgtagtccgggcgtttcattgctgttgtctgctcctggtaaatgctttttcctgcactatgacacaattttgtgtcaggttgcatataccgaagccgtcggcgggtaacatttgtattcgtggttaaacgcgcagcttaaaagatcagggatttgcgctaatgcatttcgctcagcgagttcgcgccctggttgtgttgaatggcgtggcgttattgcctcaatttgcctgtaaacaggggcttgtgaacggtgaactggtgcgcctgtttgctccgtggagcggcatacccagattgttgcatgccttatttgcggggcgaaaggggatgcctgccattgcgcgatattttatggatgagttaaccacgcggcttgccaacggggtctgaatcgctttttttgtatataatgcgtgtgaaatttcataccacaggcgaaacgatcatgacgcaggatgaattgaaaaaagcagtaggatgggcggcacttcagtatgttcagcccggcaccattgttggtgtaggtacaggttccaccgccgcacactttattgacgcgctcggtacaatgaaaggccagattgaaggggccgtttccagttcagatgcttccactgaaaaactgaaaagcctcggcattcacgtttttgatctcaacgaagtcgacagccttggcatctacgttgatggcgcagatgaaatcaacggccacatgcaaatgatcaaaggcggcggcgcggcgctgacccgtgaaaaaatcattgcttcggttgcagaaaaatttatctgtattgcagacgcttccaagcaggttgatattctgggtaaattcccgctgccagtagaagttatcccgatggcacgtagtgcagtggcgcgccagctggtgaaactgggcggtcgtccggaataccgtcagggcgtggtgaccgataatggcaacgtgatcctcgacgtccacggcatggaaatccttgacccgatagcgatggaaaacgccataaatgcgattcctggcgtggtgactgttggcttgtttgctaaccgtggcgcggacgttgcgctgattggcacacctgacggtgtcaaaaccattgtgaaatgatctgacgggggaacctcccccgttaaaaaaattctcttcattaaatttggtgacatgtgtcacgtttttacctggctattgtcgattgctctaaataaatcttctaaaccagcatattcatccaagaattacctttgcgtgatatttcctcaacatcgcgacgcaaacgttcatattgccgcaatattattttttgatatgttgaaaggcggacgcaaatccgcacacaacatttcaaaagacaggattgggtaaatggcaaaggtatcgctggagaaagacaagattaagtttctgctggtagaaggcgtgcaccaaaaggcgctggaaagccttcgtgcagctggttacaccaacatcgaatttcacaaaggcgcgctggatgatgaacaattaaaagaatccatccgcgatgcccacttcatcggcctgcgatcccgtacccatctgactgaagacgtgatcaacgccgcagaaaaactggtcgctattggctgtttctgtatcggaacaaaccaggttgatctggatgcggcggcaaagcgcgggatcccggtatttaacgcaccgttctcaaatacgcgctctgttgcggagctggtgattggcgaactgctgctgctattgcgcggcgtgccggaagccaatgctaaagcgcaccgtggcgtgtggaacaaactggcggcgggttcttttgaagcgcgcggcaaaaagctgggtatcatcggctacggtcatattggtacgcaattgggcattctggctgaatcgctgggaatgtatgtttacttttatgatattgaaaataaactgccgctgggcaacgccactcaggtacagcatctttctgacctgctgaatatgagcgatgtggtgagtctgcatgtaccagagaatccgtccaccaaaaatatgatgggcgcgaaagaaatttcactaatgaagcccggctcgctgctgattaatgcttcgcgcggtactgtggtggatattccggcgctgtgtgatgcgctggcgagcaaacatctggcgggggcggcaatcgacgtattcccgacggaaccggcgaccaatagcgatccatttacctctccgctgtgtgaattcgacaacgtccttctgacgccacacattggcggttcgactcaggaagcgcaggagaatatcggcctggaagttgcgggtaaattgatcaagtattctgacaatggctcaacgctctctgcggtgaacttcccggaagtctcgctgccactgcacggtgggcgtcgtctgatgcacatccacgaaaaccgtccgggcgtgctaactgcgctgaacaaaatcttcgccgagcagggcgtcaacatcgccgcgcaatatctgcaaacttccgcccagatgggttatgtggttattgatattgaagccgacgaagacgttgccgaaaaagcgctgcaggcaatgaaagctattccgggtaccattcgcgcccgtctgctgtactaattccccttctctgaaaatcaacgggcaggtcactgacttgcccgtttttttatcccttctccacaccgttgccgcgttgcgcattctactttgcgagtctgctccagaaaataaatcaaagtcagatcaatgcgttgtgtttatttaatggggatttacgatggcagggcagcatggggctgtaacggtaaagccctcaccgaagcgagggcttgaaggagaagggttatgatgcgacttgtcatcatactgattgtactgttactcataagtttcagcgcttattaacagtcagtctcaggggaggagcaatcctcccttacccttactcactaaattaggtcaaagaatcaacgatgtcaatcagggcgatgcaggtgtgtcgcccttaccactcccagactttcgacggtgtaaccaccgcaggcagtgggatatcccactcttcaacggggagtttttccaccaactgacaatcatgcgcataacccaccggttgcattttatagtgctgccagttttgtaaggtccgatcataaaaacctccgcccattcccaggcgctgaccgtactcatcaaaggcgaccaggggggtgatcaggacgtctaatcgggaaagggggagcacgtcacgcacatccaattttggctcatggatcttcaacctgttcatcaccagttcgctttgcggatggtaattcaggaacagcaaattaccggcactaaagggatgcaaaactggaagatatacgcgcttaccggcgcgccagagttgttctatgagtggctgggtgtcgagttcgccatcaaaagagaggaatacagcgaccgtatgtgccatcaccaccgggggataagtcatcatccgggtagcggcttgttgacccatttcctgctgttgttccggcgttaacgcacgacgacgttgccgaatcattttgcggatttcttgtcgggataatatcagtgggagttctggtagttgcgtcatggctggtgccagataagaagggaatctccgagatgccgccgcaggctgtaacccttgaacccttggttcaaggtgaatgtgtcgtcgcagttttaaggcttctcggacggaccgagcatgctcaccaaccgcggagcgccacattcttgtggtatgaaatatcggctcaggggactggcccgcttgcgaacatctcagagaaattttgtcttcacggttactctaccacagtaaaccgaaaagtgtcattcaaagttttggttagttttttcggtgatgcgaccttgttcaagtaacgcttgttctatggtctgctgcagcatccgaatacgctgttccatacttgccgcgtagtcacgagtcttcgctttttcttgcgctaactcatagctgatattcaatgcggcaatgaagaccaactgttcagtatttgtgactctagtgcgttctttcagatcttgcaaccgttggttcagatcgtccgctgcctgattcaacgcatccctttggtcaggcgggcagttcacacgcagtgaacggccaaaaatttggatatcgacgggttgtgcagacatgccaccttcctgctgattgactgcgctgccttcgtctttagacccatggtctgcgaaggggcgacactatagctaccctgatgagaagagacaagcccttttctggtccaccagggcccaaagtggtagcatatcatgaatattcctccctttgacgacgaatgcttatgtctatacagaacgaaatgcctggttacaacgaaatgaaccagtatctgaaccaacaagggacgggtctgaccccagctgagatgcatggtttaatcagcgggatgatatgtggcggtaacgatgacagctcatggctaccgctacttcacgacctgacgaacgaaggcatggctttcggtcatgagctggcacaggcactgcgtaaaatgcactctgccaccagcgatgccctgcaggatgacggcttcctttttcagctttatctgcctgatggcgatgatgtcagcgttttcgatcgggctgatgcattggcaggttgggtcaatcacttcctgcttggtcttggcgttacgcaaccgaagctggataaagtgaccggcgaaaccggtgaagctatcgacgatctgcgtaacattgcgcaactgggttacgacgaagacgaagatcaggaagagcttgaaatgtcgcttgaagagatcatcgaatacgttcgtgttgccgcgctgttatgccacgacacctttactcatccgcaaccgaccgcgccagaagtacaaaaaccgactctacactaaaaacaaaaaacgtaaggagagtgttatgagtgagatatcccggcaagagtttcagcgtcgccgtcaggccctggtggagcaaatgcaacccggcagcgccgcgctgatttttgctgcaccagaagtaacacgtagcgccgacagcgaatacccctatcgtcagaacagtgacttctggtacttcaccggctttaacgaaccggaagcggtgctggtgctgattaaaagcgatgacactcataaccacagcgttctgtttaaccgcgttcgcgacctgacggcggagatctggtttggccgtcgcttaggccaggatgccgcgccagagaaactgggcgttgaccgcgcactggcattcagcgaaatcaatcagcaactttatcaactacttaacggcctggatgtggtttaccatgcccagggcgaatatgcatatgctgatgaaatcgtgaacagtgcgctggaaaaactgcgtaaaggttcgcggcaaaatctcaccgcaccggcaacgatgatcgactggcgtcctgttgttcatgaaatgcgcctgttcaaatcgccagaagagattgccgtactccgccgcgcgggagaaatcaccgccatggcacatacccgggcgatggaaaaatgccgtccgggaatgttcgagtaccatctggaaggcgaaattcaccacgaatttaaccgccacggtgcgcgctatccgtcctataacaccattgtcggcagcggtgaaaacggctgcattctgcactacaccgaaaacgagtgtgaaatgcgcgacggcgacctggtgttgattgacgcgggttgcgaatacaaaggttacgctggcgatattacccgcaccttcccggtcaacggcaaattcacccaggcccagcgtgaaatctacgacattgtgctggagtctctcgaaaccagcctgcgcctgtatcgtccgggaacttccattctggaagtcactggtgaagtggtgcgcatcatggttagcggcctggtaaaactcggcatcctgaaaggtgatgttgatgaactgatcgctcagaacgcccatcgtcctttctttatgcatggccttagccactggttaggactggatgtccatgacgttggcgtttatggtcaggatcgctcgcgcattctggaaccggggatggtactgaccgtagagcctggtctgtatatcgcgccggatgcggatgtgccagaacaatatcgcggtatcggcattcgtattgaagacgacattgtgattaccgaaaccggtaacgaaaacctcaccgccagcgtggtgaaaaagccggaagaaatcgaagcgttgatggctgctgcgagaaagcaatgagcgtaatcatcgtcggtggcggcatggcgggcgcgacgctggcgctggctatttcccggttaagtcacggggcgctgccggtacatttgattgaagcgactgcgccagagtcacatgctcatccgggctttgatggacgagcgatagcgctggcggcgggtacctgtcagcaactggcgcgcatcggcgtctggcaatctctggcggattgcgcaactgccatcaccaccgtgcatgtcagcgatcgtggtcacgctggatttgtcaccctcgccgcagaagattaccaactggcggcgctgggacaggttgtcgaattgcacaatgtcgggcaacggctgtttgcattgctgcgtaaagcacctggcgtaacgctgcattgccctgatcgcgtggctaacgttgcccgtactcagagtcacgttgaagtgacgctggagagtggcgagacgctgacgggccgcgtgctggtagccgctgatggcacccattcagcgttagccaccgcgtgcggcgttgactggcagcaggagccttacgaacaactggcagtgattgccaacgttgctacttctgttgcgcacgaaggccgcgcttttgaacgcttcacgcaacatggcccgctggcgatgttgccgatgtctgacggacgctgttcgctggtctggtgtcatccactggaacggcgcgaagaggtgctgtcgtggagtgacgagaagttttgccgtgagctccagtcggcctttggctggcgacttggaaaaattacccacgccggtaaacgcagtgcttatccgctggcgttaacccgcgccgccagagctattacccatcgtaccgtgctggtgggcaatgcggcgcaaaccctgcacccgattgccgggcaagggttcaacctcggtatgcgagatgtgatgagtcttgcggaaaccctgactcaggcgcaggagcgcggagaagacatgggggattacggcgtattgtgccgttatcagcagcgtcgacagagcgatcgcgaagcaaccatcggcgtcacggacagcctggtacatctttttgccaaccgttgggcaccgctggttgtcgggcgcaacatcggactgatgacgatggaattattcaccccggcacgcgatgtgctggcgcagcgcaccctcggttgggtggcgcgttgaaggcggttttaaggaataaacaatgcaaagtgttgatgtagccattgttggtggcggcatggtggggctggcggttgcctgcggcttacaggggagcggcttacgcgttgccgtactggagcagcgcgtaccggaacctctggcggcggatgcaccaccacaactgcgcgtttcggctatcaatgccgccagcgaaaaattactcacccgtcttggcgtctggcaggacattctctctcgtagggccagttgttatcacggtatggaagtgtgggacaaagacagttttggtcacatttcgtttgacgatcaaagcatgggctatagccatcttgggcatatcgttgaaaactcagtgattcactacgcgctgtggaacaaagcgcagcagtcgtcagatatcactctgttggcccccgcagaattacagcaggtcgcctggggagaaaatgaaactttcctgacgctgaaagatggcagcatgttaacggcgcgtctggtgattggcgcggacggtgctaattcctggttgcgcaacaaagcagatattccgctgactttctgggattatcagcatcacgcgctggtagcgaccattcgcacggaagaaccgcatgatgcggtggcgcggcaggttttccatggcgaaggcattctggcctttttaccgcttagcgatccgcatctttgctcaattgtctggtcactgtcgccagaggaagcgcagcggatgcagcaggcaagtgaagatgaatttaatcgcgcgttaaatatcgcttttgataatcgcctgggcttatgcaaggttgagagcgcgcgtcaggtgttcccactgacggggcgttatgcgcgccagtttgccgcgcaccgtctggtgctggtgggcgacgccgcgcataccattcacccgctggcggggcagggagtaaatctcggctttatggatgctgcagagctgattgctgaactgaaacggttgcatcgtcaggggaaagacatcgggcagtacatttacctgcgccggtatgagcgtagccgcaagcacagtgcggcgctgatgctggctggtatgcagggattccgcgatctgttttccggtaccaatccggcgaaaaaactgctgcgtgatattggtttgaaactggccgacacgcttcctggcgttaaaccacaacttatccgccaggcaatgggattaaacgatttgcctgaatggctgcgttaaaaatttctcttctgctgtttatttgatacccatcacactttcatctcccggttttttcgccgggagattttcctcatttgaaataaactaatttcacctccgttttcgcattatattttctaatgtcattattttttgatttagtgttttttgacatttttttagctcttaatattgccttattcaaattagctttctaatggcatcatctttatatagaaactggtgtgttttttggttttttattctgtcgcgattttggcgttttttaaccataagctaatgtgatgatcaattttaccttatggttaacagtctgtttcggtggtaagttcaggcaaaagagaacgattgcgttggggaccgggagtggctccgatgctgggtttcgtggtgataatttcaccatgaaaagttgtcagccccgcttattcaatgaggacaagatggcacaacagactcctttgtacgaacaacacacgctttgcggcgctcgcatggtggatttccacggctggatgatgccgctgcattacggttcgcaaatcgacgaacatcatgcggtacgtaccgatgccggaatgtttgatgtgtcacatatgaccatcgtcgatcttcgcggcagccgcacccgggagtttctgcgttatctgctggcgaacgatgtggcgaagctcaccaaaagcggcaaagccctttactcggggatgttgaatgcctctggcggtgtgatagatgacctcatcgtctactactttactgaagatttcttccgcctcgttgttaactccgccacccgcgaaaaagacctctcctggattacccaacacgctgaacctttcggcatcgaaattaccgttcgtgatgacctttccatgattgccgtgcaagggccgaatgcgcaggcaaaagctgccacactgtttaatgacgcccagcgtcaggcggtggaagggatgaaaccgttctttggcgtgcaggcgggcgatctgtttattgccaccactggttataccggtgaagcgggctatgaaattgcgctgcccaatgaaaaagcggccgatttctggcgtgcgctggtggaagcgggtgttaagccatgtggcttgggcgcgcgtaacacgctgcgtctggaagcgggcatgaatctttatggtcaggagatggacgaaaccatctctcctttagccgccaacatgggctggaccatcgcctgggaaccggcagatcgtgactttatcggtcgtgaagccctggaagtgcagcgtgagcatggtacagaaaaactggttggtctggtgatgaccgaaaaaggcgtgctgcgtaatgaactgccggtacgctttaccgatgcgcagggcaaccagcatgaaggcattatcaccagcggtactttctccccgacgctgggttacagcattgcgctggcgcgcgtgccggaaggtattggcgaaacggcgattgtgcaaattcgcaaccgtgaaatgccggttaaagtgacaaaacctgtttttgtgcgtaacggcaaagccgtcgcgtgatttacttttttggagattgattgatgagcaacgtaccagcagaactgaaatacagcaaagaacacgaatggctgcgtaaagaagccgacggcacttacaccgttggtattaccgaacatgctcaggagctgttaggcgatatggtgtttgttgacctgccggaagtgggcgcaacggttagcgcgggcgatgactgcgcggttgccgaatcggtaaaagcggcgtcagacatttatgcgccagtaagcggtgaaatcgtggcggtaaacgacgcactgagcgattccccggaactggtgaacagcgaaccgtatgcaggcggctggatctttaaaatcaaagccagcgatgaaagcgaactggaatcactgctggatgcgaccgcatacgaagcattgttagaagacgagtaacggctttattcctcttctgcgggagaggatcagggtgaggaaaatttatgcctcaccctcactctcttcgtaaggagagaggttcacaattcactgcacgtttcaggaaccatcgctcatgacacagacgttaagccagcttgaaaacagcggcgcttttattgaacgccatatcggaccggacgccgcgcaacagcaagaaatgctgaatgccgttggcgcacaatcgttaaacgcgctgaccggccagattgtaccgaaagatattcagcttgcgaccccgccgcaggttggcgcaccggtgaccgaatacgccgcactggcagaactcaaggctattgccagtcgcaataaacgcttcacgtcttacatcggcatgggttacaccgccgtgcagctaccgccggttatcctgcgtaacatgctggaaaatccgggctggtataccgcgtacactccgtatcaacctgaagtctcccagggccgccttgaagcactgctcaacttccagcaggtaacgctggatttgactggactggatatggcctctgcttctcttctggacgaggccaccgctgccgccgaagcaatggcgatggcgaaacgcgtcagcaaactgaaaaatgccaaccgcttcttcgtggcttccgatgtgcatccgcaaactctggatgtggtccgtactcgtgccgaaacctttggttttgaagtgattgtcgatgacgcgcaaaaagtgctcgaccatcaggacgtcttcggcgtgctgttacagcaggtaggcactaccggtgaaattcacgactacactgcgcttattagcgaactgaaatcacgcaaaattgtggtcagcgttgccgccgatattatggcgctggtgctgttaactgcgccgggtaaacagggcgcggatattgtttttggttcggcgcaacgcttcggcgtgccgatgggctacggtggcccacacgcggcattctttgcggcgaaagatgaatacaaacgctcaatgccgggccgtattatcggtgtatcgaaagatgcagctggcaataccgcgctgcgcatggcgatgcagactcgcgagcaacatattcgtcgtgagaaagcgaactccaacatttgtacttcccaggtactgctggcaaacatcgccagcctgtatgccgtttatcacggcccggttggcctgaaacgtatcgctaaccgcattcaccgtctgaccgatatcctggcggcaggcctgcaacaaaaaggtctgaagctgcgccatgcgcactatttcgacactctgtgtgtggaagtggccgacaaggcgggcgtactggcgcgtgccgaagcggctgaaatcaacctgcgtagcgatatcctgaacgcggttgggatcacccttgatgaaaccaccacgcgcgaaaacgtgatgcagcttttcagcgtactgctgggggataaccacggcctggacatcgacacgctggacaaagacgtggctcacgacagccgctctattcagcctgcgatgctgcgcgacgacgaaatcctcactcatccggtgtttaatcgctaccacagcgaaaccgaaatgatgcgctatatgcactcgctggagcgtaaagatctggcgctgaatcaggcgatgatcccgctgggttcctgcaccatgaaactgaacgccgccgccgagatgatcccaatcacctggccggaatttgccgaactgcacccgttttgcccgccggaacaggctgaaggttatcagcagatgattgcgcagctggctgactggctggtgaaactgaccggttacgacgccgtttgtatgcagccgaactccggcgcacagggcgaatacgcgggcctgctggcgattcgtcattatcatgaaagccgcaacgaagggcatcgcgatatctgcctgatcccggcttctgcgcacggaactaaccccgcttctgcacatatggcaggaatgcaggtggtggttgtggcgtgtgataaaaacggcaacatcgatctgactgatctgcgcgcgaaagcggaacaggcgggcgataacctctcctgtatcatggtgacttatccttctacccacggcgtgtatgaagaaacgatccgtgaagtgtgtgaagtcgtgcatcagttcggcggtcaggtttaccttgatggcgcgaacatgaacgcccaggttggcatcacctcgccgggctttattggcgcggacgtttcgcacctcaacctgcataaaactttctgcattccgcacggcggtggtggtccgggtatgggaccgatcggtgtgaaagcgcatctggcaccgtttgtaccgggtcatagcgtggtgcaaatcgaaggcatgttaacccgtcagggcgcagtttctgcggcaccgttcggtagcgcctctatcctgccaatcagctggatgtacatccgcatgatgggcgcagaagggctgaaaaaagcaagccaggtggcaatcctcaacgccaactatattgccagccgcctgcaggatgccttcccggtgctgtataccggtcgcgacggtcgcgtggcgcacgaatgtattctcgatattcgcccgctgaaagaagaaaccggcatcagcgagctggatattgccaagcgcctgatcgactacggtttccacgcgccgacgatgtcgttcccggtggcgggtacgctgatggttgaaccgactgaatctgaaagcaaagtggaactggatcgctttatcgacgcgatgctggctatccgcgcagaaattgaccaggtgaaagccggtgtctggccgctggaagataacccgctggtgaacgcgccgcacattcagagcgaactggtcgccgagtgggcgcatccgtacagccgtgaagttgcggtattcccggcaggtgtggcagacaaatactggccgacagtgaaacgtctggatgatgtttacggcgaccgtaacctgttctgctcctgcgtaccgattagcgaataccagtaattcactgattcgactattttctaaaggcgcttcggcgcctttttagcttgttaataaagtgcgctttgtgtgtttcggctgaggcgtaatataaaatattgcgagctcaatatattaaaagagtgccaggcctgatgagcgtagcgcatcaggcacatcggctaattacagattctcgccgttgctggcaatcacctctttgtaccagttaaagctcttcttacgtgaacgcgacatatcgccagtaccgtcgtcatgtttattcacatagataaagccgtagcgtttgctgtactgcccggtggtgaacgacacgcagtcgatgcagccccacggtgtgtagcccatcagatccacgccatcgtaagtcaccgcttttttcatctcttcgatatgggcgcgcaggtagtcaatgcggtagtcgtcgttgatgctgccatcttcttccactttgtcgtaagcgccaaaaccgttttcgacaataaacagcggcctctgataacgctcatacagttcgcaaagggcatagcgcagacctactggatcaatctgccagccccagtcagacgctttaacatacgggttcggtacgctgccttcgaaaccagagatcgcatcgccggtgccgccttcggccttcactgcgttggtcatgtaatagctgaaaccaagataatcgcaggtgcctttgcgcagtacatccagatcgccatcttccattttgatgttaaatccgcgacgctcccactcgttcaacacataggacgggtaatagccgcgtagctgcacatcggtaaagacgtagcgttcgcgcatcgactcctgagcgaacatcacatcttccgggttacaggagtagggatacagcggcaccatcgccagcatacagccgactttcatctccgggttaatgcgacgcgcagctttcaccgccagggcgctggcgacaaactggtgatgcagcacctgatacatcgtctcttccgggttctcatgctcggtataaaccacgccggagcagcagtaaccgaacagcggtgcacgccagttacgctggttgttaatttcgttgaaggtcatccagtatttgactttatgcttatagcgttcaaacaccacttccgcgaaacggacaaagaaatcaaccactttacggttggtccagctaccgtattgctgcaccagatgcagcggcatttcaaagtgggagagggtgatcaccggttcgatgttgtatttcagcagttcatcgaacatatcatcgtagaacttcagcccttcttcgtttggctgagcttcatcgccttttggaaaaatgcgcgtccaggcgatggaagtccgaaaacatttgaagcccatttcggcaaatagcttgatgtcttccttgtagtgaccataaaaatcaacggcttcatggtttggatagtatttgcctggcaagacttctttggttatttcgcgcggcacgccgtgtgcgccaccggtcagtacgtcacaaatactcggccctttgccgcctttgttccagccgccttcgacctgatgagcggcaactgcgccgccccataagaaatctttcggtaaggtgagttttttcactatcataggctccagatgagtcaattcttacaggaaatagtaccatgcagccaaacgacatcactttttttcaacgtttccaggatgacattctggctgggcgtaaaaccatcaccatccgcgacgagactgaatcgcacttcaaaacgggtgatgtgcttcgtgtcgggcgttttgaagatgacggttatttttgcacgattgaagtcaccgcaacctcaaccgtaacgctggatacgctgacggaaaaacatgcagagcaggaaaatatgaccctgactgaactgaaaaaggttattgctgatatctatcccggtcagacacagttttatgtgattgaatttaaatgtctttaaattgaactcacgcctgttagttgaaatttcgcatttaatttcatgatttatcggagattaatcccaaatcagaatttattttagctaacaggtgttcactggaactattctcagttacgctggagaggtatacatgtgcgtgtacgtttctccggagtcagttatggttcagaagcccctcattaagcagggatattcgctggcagaggaaattgccaacagcgtcagtcacggcattgggctggtgtttggtatcgttgggctggtgttgctactggttcaggcggtggatctcaatgccagtgctacagcgataaccagttacagcctttatggcggcagtatgatcctgctgttcctcgcttcgacgctctatcacgccattccccatcaacgggcaaaaatgtggctgaagaaatttgaccattgcgctatttacctgttgattgccggaacctacacgccgtttttgctggtggggctggattctccgttagcgcgcgggttgatgattgttatctggagcctggcattgctggggattctgttcaaactgaccatcgcgcaccgattcaaaattttatctctggtgacttatctggcgatgggctggctgtcgctggtggtaatttatgaaatggcagttaagctcgcggcgggcagcgttaccttactggcggtaggcggcgtggtttattcgctcggggtgattttctacgtctgcaaacgcattccatacaaccatgccatctggcacggcttcgtgctcggcggtagtgtgtgccactttctggcgatctatttgtatattgggcaggcgtaatgggtatgcctttgtaggcctgataagacgcgccagcgtcgcatcaggcatcggagcgcaaccgccggatgcggcgtgaacgccttatccgatctacgggcctcgtccctgttgtgataaaggcatcaaatcccagacatgataagacgcgtcagcgtcgcatcaggcgataaatgcctgatgcgatacagagatttactcttcgagcgaatacggcagcggctcgatatgcagtgtattcgcatcgtcgcgtacgcggaagatgctgtccggttccatatcgttattcatgacgacctgtaccacgacctgaccatcttccagttttaccgcagccagcaccgtaccggtacgacgccagttctcgcccattttcagctctaagtcttcaccagcttccggcagtcggctggcgctacctgccagcaaccagagcgcacgtttattggcaccacggaattttgctcgcgccaccatctcttgtccggtataacagcctttcttaaagctgataccgcccagcgcctggagattggtcgcctgtgggataaactgcccgctgttcgcggcatcaatcaccgggaaacccgcttcaatgtttaatgccagccactgttggctattgttcagttccgcttcaccgcgcagtttatcggtcagcatattggcagtagcttcatcggttacgatcaggaaacgttctgccgggtgttcaaaccatagcaaagtggtcgcgccttctttaactacctgtttttctctcgaaggtagttcactaaagatattggccagcgcggcgcgcgcctgaaaaccggcaacaccaagcagcacacgctcgtcgtctggcgcgatggtcactttagagaataccgcatattttttcagttcagtcagctgcggttcacgcacactgcgccgttcaatccacgcaaagccatcgccgtcgcggaacagacgtaaattgctccacattttacctttggcgtcgcaatgggcggcgagcagatgctgattttctgtcatctggctgacatctgctgtcacctgaccctgcatatatttttcgctgtccgcgccagtaatggtggcaagcgcccagtcatcaagcgtcatcagcgtcagcggtaaacgggcagaagccgtaggctgacggggaggaaaaggtgtaaaagccataatagagtcctgagttgcttaacggcgtattaataactaatggtaaaagagctatgaggcaatgcaagtgctttcactacgcgatctgtgccttctgcgaggcgacttccaaaaaaatgaagcccttgaattgttgtgaattaatttcgcgatcgcgattgtgtttactgatattcccgtaaaagaagtcgaaaaacacgttacaatagcggggtactggattttcgtgagacaggaagacgatggacattaacaacaaagcccgcattcattgggcatgccgccgtggtatgcgcgaactcgatatttcaatcatgccgtttttcgaacatgagtacgacagcttaagcgatgacgaaaaacgcatctttattcgtctgctggaatgtgacgatccagacctgtttaactggctgatgaatcacggtaaaccggccgatgcagaactggaaatgatggtccgactcatccagacacggaaccgggaacgtggtcctgtggcaatctgatttgcgcgtctcctggcgcgcacagtggctttccttgctgattcatgggctggttgccgctgttattttactcatgccctggccgctcagttacaccccgttatggatggtgttactttcgctggtggtgtttgattgcgttcgcagccagcggcgtattaatgctcgccagggggaaattcgcttgttgatggacgggcgtttgcgttggcaagggcaggagtggagcatcgtcaaagcaccgtggatgattaagagcggcatgatgctgcgtttacgttctgatggcggtaaacggcaacatttatggctggcagccgacagcatggacgaagccgaatggcgggatttacggcggatattgttgcaacaagagacgcaaagataaagatgacggcaaagcatatgtgctaagccgtcagtgacatcaggcgtaatgctctgccatttcgttgaggatttgctcgcaccagctctgaatacgctcgtcgctaaggtcatactggttagtttcatccagcgccagacccacgaacagttgcccgtcagcaatcaccggtttcgggctggtaaattcatatccttccgttggccagtagccgacgaactttacgcctttggtcgagagtttgtcatgcagcataccgagcgcatcgaggaaccactcgccgtatcccagttgatcgccaagcccatacagcgcaacaattttaccttcgaggttcaggtcgtcgagctgatcccagacggcttcccagtcttcctggatttcaccaaaatcccaggtcgggatacccagaatgagcacatcgtactgctccattaatttcggggagtcgtccttgaggttatgtaaggtcaccagttctgggccgataatatcgcggattttttctgccgccatttcggtgtaacaggtgctggaaccgtaaaaaagacccatattcataacgtaagcttctcgattctgctgtggcttttgtggctagtgtatcagaatcgctttagtcacggcacaataaggcataatggatcaaatgagtgaccataaggggcgcaagtgaaacaggatctggcacgcatcgagcagtttcttgatgctctgtggctggaaaaaaatctggctgaaaatacgttgaacgcttaccgtcgcgatctgtcaatgatggtggagtggttgcatcaccgcgggttgacgctggcgacggcgcaaagtgacgatttgcaggcattactggcagaacggctggagggcgggtataaagccaccagctcagcgcgtttgctgagtgcagtgcgccgattgttccagtatctttatcgcgaaaagtttcgtgaagacgatcccagtgcgcatctcgcttcaccgaaattgccccagcgtttgccaaaagatttaagcgaagcgcaggttgaacgtttattacaggcaccattaattgatcagccactggagctacgcgataaagccatgcttgaagtgttgtatgctaccgggctgcgtgtctctgaactggtcgggctgacaatgagtgatatcagcctgcgtcagggcgtagtgcgggtcattggtaaaggcaacaaagagcgcctggtgccgttaggtgaagaggcggtttactggctggaaacctatctggaacatgggcgtccgtggctactgaatggtgtgtcaattgacgtgttgtttcccagccagcgtgcgcagcagatgacgcgacagaccttctggcaccgcattaaacattatgccgtgctggcgggtatcgacagcgaaaagctgtcaccgcatgtgttgcgtcacgcttttgccactcacttattaaatcatggtgcggatttacgcgtggtgcagatgctactgggccacagcgatctctccaccacgcaaatttatacgcatgtcgctaccgagcgtctgcggcaacttcatcaacagcatcacccgcgggcgtgatgtctgaaaagaacgggaagatttatgaagaaaggttttatgttgtttactttgttagcggcgttttcaggctttgctcaggctgatgacgcggcaattcaacaaacgttagccaaaatgggcatcaaaagcagcgatattcagcccgcgcccgtagctggcatgaagacagttctgactaacagcggtgtgttgtacatcaccgatgatggtaaacatatcattcaggggccaatgtatgacgttagcggcacggctccggtcaatgtcaccaataagatgttgctaaagcagttgaatgcgcttgaaaaagagatgatcgtttataaagcgccgcaggaaaaacacgtcatcaccgtgtttactgatattacctgtggttactgccacaaactgcatgagcaaatggcagactacaacgcactggggatcaccgtgcgttatcttgctttcccgcgccaggggctggacagcgatgcagagaaagaaatgaaagctatctggtgtgcgaaagataaaaacaaagcgtttgatgatgtgatggcaggtaaaagcgtcgcaccagccagctgcgacgtggatattgccgaccattacgcacttggcgtccagcttggcgttagcggtactccggcagttgtgctgagcaatggcacacttgttccgggttaccagccgccgaaagagatgaaagaattcctcgacgaacaccaaaaaatgaccagcggtaaataattcgcgtgaaacaacagatacaacttcgtcgccgtgaagtcgatgaaacggcagacttgcccgcggaattgcctcccttgctgcgccgtttatacgccagccggggagtacgcagtgcgcaagaactggaacgcagtgttaaaggtatgctgccctggcagcaactgagcggcgtcgaaaaggccgttgagatcctttacaacgcttttcgcgaaggaacgcggattattgtggtcggtgatttcgacgccgacggtgccaccagcacggctctaagcgtgctggcgatgcgctcgcttggttgcagcaatatcgactacctggtaccaaaccgtttcgaagacggttacggcttaagcccggaagtggtcgatcaggcccatgcccgtggcgcgcagttaattgtcacggtggataacggtatttcctcccatgcgggagttgagcacgctcgctcgttgggcatcccggttattgttaccgatcaccatttgccgggcgacacattacccgcagcggaagcgatcattaaccctaacttgcgcgactgtaatttcccgtcgaaatcactggcaggcgtgggtgtggcgttttatctgatgctggcgctgcgcacctttttgcgcgatcagggctggtttgatgagcgtaacatcgcaattcctaacctggcagaactgctggatctggtcgcgctggggacagtggcggacgtcgtgccgctggacgctaataatcgcattctgacctggcaggggatgagtcgcatccgagccggaaagtgccgtccggggattaaagcgctgcttgaagtggcaaaccgtgatgcacaaaaactcgccgccagcgatttaggttttgcgctggggccacgtctcaatgctgccggacgactggacgatatgtccgtcggtgtggcgctgttgttgtgcgacaacatcggcgaagcgcgcgtgctggcaaatgaactcgatgcgctaaaccagacgcgaaaagagatcgaacaaggaatgcaaattgaagccctgaccctgtgcgagaaactggagcgcagccgtgacacgctacccggcgggctggcaatgtatcaccccgaatggcatcagggcgttgtcggtattctggcttcgcgcatcaaagagcgttttcaccgtccggttatcgcgtttgcgccagcaggtgacggtacgctgaaaggttccggtcgctccattcaggggctgcatatgcgtgatgcgctggagcgattagacacactctaccctggcatgatgctgaagtttggcggtcatgcgatggcggcgggtttgtcgctggaagaggataaattcaaactctttcaacaacggtttggcgaactggttactgagtggctggacccttcgctattgcaaggcgaagtggtatcagacggtccgttaagcccggccgaaatgaccatggaagtggcgcagctgctgcgcgatgctggcccgtgggggcagatgttcccggagccgctgtttgacggtcatttccgtctgctgcaacagcggctggtgggcgaacgtcatttgaaggtgatggtcgaaccggtcggcggcggtccactgctggatggtattgcttttaatgtcgataccgccctctggccggataacggcgtgcgcgaagtgcaactggcttataagctcgatatcaacgagtttcgcggcaaccgcagcctgcaaattatcatcgacagtatctggccaatttagcgtcatcttctctataaaaaagagcgtggattgggtacaatcccgctcttatcaccgcattttgactagctcaataaaagaaatcagaccatgtttgaaattaatccggtaaataatcgcattcaggacctcacggaacgctccgacgttcttagggggtatctttgactacgacgccaagaaagagcgtctggaagaagtaaacgccgagctggaacagccggatgtctggaacgaacccgaacgcgcacaggcgctgggtaaagagcgttcctccctcgaagccgttgtcgacaccctcgaccaaatgaaacaggggctggaagatgtttctggtctgctggaactggctgtagaagctgacgacgaagaaacctttaacgaagccgttgctgaactcgacgccctggaagaaaaactggcgcagcttgagttccgccgtatgttctctggcgaatatgacagcgccgactgctacctcgatattcaggcggggtctggcggtacggaagcacaggactgggcgagcatgcttgagcgtatgtatctgcgctgggcagaatcgcgtggtttcaaaactgaaatcatcgaagagtcggaaggtgaagtggcgggtattaaatccgtgacgatcaaaatctccggcgattacgcttacggctggctgcgtacagaaactggcgttcaccgcctggtgcgtaagagcccgtttgactccggcggtcgtcgccatacgtcgttcagctctgcgtttgtttacccggaagttgatgatgatattgatatcgaaatcaacccggcggatttgcgcattgacgtttatcgcgcgtccggcgcgggcggtcagcacgttaaccgtaccgaatctgcggtgcgtattacccacatcccgaccgggatcgtgacccagtgccagaacgaccgttcccagcacaagaacaaagaccaggccatgaagcagatgaaagcgaagctttatgaactggagatgcagaagaaaaatgctgagaaacaggcgatggaagataacaaatctgacatcggctggggcagccagattcgttcttatgtccttgatgactcccgcattaaagatctgcgcaccggggtagaaacccgcaacacgcaggccgtgctggacggcagcctggatcaatttatcgaagcaagtttgaaagcagggttatgaggaaccaacatgtctgaacaacacgcacagggcgctgacgcggtagtcgatcttaacaatgaactgaaaacgcgtcgtgagaagctggcgaacctgcgtgagcagggaattgccttcccgaacgatttccgtcgcgatcatacctctgaccaattgcacgcagaattcgacggtaaagagaacgaagaactggaagcgctgaacatcgaagtcgccgttgctggccgcatgatgacccgccgtattatgggtaaagcctcttttgttaccctgcaggacgttggcggtcgtattcagctgtacgttgcccgtgacgatcttccggaaggcgtttacaacgagcagttcaaaaaatgggatctcggcgacatcctcggcgcgaaaggtaaactgttcaaaaccaaaaccggcgaactgtctatccactgcaccgagctgcgtctgctgaccaaagcactgcgtccgctgccggacaaattccacggcttgcaggatcaggaagcgcgctatcgtcagcgttatctggatctcatctctaacgatgaatcccgcaacacctttaaagtgcgttcgcagatcctctctggcattcgccagttcatggtaaatcgcggctttatggaagttgaaacgccgatgatgcaggtgatcccaggcggtgcggctgcgcgtccgtttatcacccatcataacgcgctggatcttgacatgtacctgcgtatcgcgccggaactgtacctcaagcgtctggtggtcggtggcttcgagcgtgtattcgaaatcaaccgtaacttccgtaacgaaggtatttccgtacgtcataacccagagttcaccatgatggaactctatatggcttacgcagattacaaagatctgatcgagctgaccgaatcgctgttccgtactctggcacaggagattctcggtaagacggaagtgacctacggcgacgtgacgctggacttcggtaaaccgttcgaaaaactgaccatgcgtgaagcgatcaagaaatatcgcccggaaaccgacatggcggatctggacaacttcgactctgcaaaagcgattgctgaatctatcggcatccacgttgagaagagctggggtctgggccgtatcgttaccgagatcttcgaagaagtggcagaagcacatctgattcagccgaccttcattactgaatatccggcagaagtttctccgctggcgcgtcgtaacgacgttaacccggaaatcacagaccgctttgagttcttcattggtggtcgtgaaatcggtaacggctttagcgagctgaatgacgcggaagatcaggcgcagcgcttcctggatcaggttgccgcgaaagacgcaggtgacgacgaagcgatgttctacgacgaagattacgtcaccgcactggaacacggcttaccgccgacagcaggtctgggaattggtatcgaccgtatggtaatgctgttcaccaacagccataccatccgcgacgttattctgttcccggcgatgcgtccagtaaaataagcattacgttatgctcataaccccggcaaatgtcggggttttttaattgtgctgcgcgaaagcagacaacaattttcttgcttcactattggctgcctgcattaccatccacggactgaacgcccacggcgtggcatcaataccgtgtaatacatctgctaaatcacaccattgataatccatcacttcatcatcgttgatctgtaacgcactgttggtgcgtgcggcaaataccggacacacttcattttccacaatgccattcggatcggtggcgcgatagcgaaagtcaggatagatagattcaggaggcgtaatttccacgccaagctcataacggcaacggcggatcactgcgtcttcgttgctttctcccagttgtgggtgcccacaaaccgagttagtccacacgccaggccatgcttttttgctcagtgcgcggcgggtaactaataattgccccttggcattaaacagccaactggagaacgcgagatgtaagagggtgtctgccgtgtgtgcggcatacttttccagcgtacccgtgggaactccctgtgcattcaataaaatgacgtgttccgtttgcataatttctcacatgtaattctgatcactcatcattatagataattgaagagtgaaatgattaaccaagtgagcgtttatcgacaaccgcccgttttgagcggatgccgacaggtaaaaaccatttaaaaaagtagcatcatatatttgaagcgactttcaatggccattgcaacacagtcagaaatgacaggaatagagagagtaaaaagcaacagcagactgaatatagcgcgcattaaaagattcatattattctccatgctcatttttcttcagcttgcgcatcagaagccacatacgtactgtcctgacttttaaatctttatcagagacggattccttcaccaggtcagcatgatgctgatagccattaaagaagacgttcagcacaacggcgctaagggttgcgagcataatgccgctatgtagcagcggttgcagtacggccggtaacttagaaaagaaatcgtgagagagcgtcggagtcatgccaacgccgagactgatcgccacaatatagaggttgtaacggttggtggtgtagttacagcgcgacagaattcgaatccctgtcgccagtaccatgccgaacatcaccagcccagcgccgcccagcacaaattgcggaatggaggcgaccagcaccgccatttttggcaccatgccaaacaggattaatataattcccgaagaaatacacacccagcggctatgaacacgcgtcacgctaaccaggccaacgttttgtgaaaatgacgtgtgggggaagctgttaaacgttccgcctatcattgtccctacgccatcgacacgcagcccgcgaataatatcgtgtgaagagagtttacgaccgactatttcacccagtgccaggaacatccccatcgactcgataaacacgatgattaacacggcagtcatggtcagaatggaaacgggatcgaaaatcggcataccaaacgacatcggggtgacaatcgcaaaccacgaggcatcatgtagcccggataagttgacttcattcatcatccacgaaagtaaaaagccaaatacaatccccagtaatacggcgacgttggacataaatcctttcgcatagcgagtaatgagcaagataaaaattaagacggcaaaggagatacctaaataaacgggattaccatattgcggattccctttacctccggcggcccagtcaatacccacctgaatgatgctaagcccaatagaagtaataaccacaccggtaaccagtggcgggaataaaggcatcaagcgaccgataagtggcgctaataatgtggtgataaaacccgcggcgatagtggcaccaaagatccccagcaggccgatatccgggttcatcccaatggctatcattggtgttacagcagcaaaggtcaccgacataatcaccggcaggcggatccccataaagcggccgataccgatacattgcaataatgtgacgatcccgcagcaaaagagatccgagctaatgagcatcgcaatagcttcttttgagaggcccagtcggtcaccaatcataagaggaacagcgactgcacctgcgtacatgacaaggacgtgttgcagaccgagtatgatcagctttcctggtgataatatgcggtcaacctcatcagttgggcggtcttgcccagaagatgagggaagttgggaatctatggcgctcatcagtgtttctcctttcgcccgccagagtaaaaagcaaccgtttacgttaatgaaactgtctaaacacatgctcgtggagtgccagtttttgcgaggaaggggagttagagacaggaattgcggaggcaatcacataatcgtggttaaaccacgaaaatgagaagagaacctaacaatggaattatctgtaattttctcatattgatatttcattaatcattctggcatgtcgtactctcgcatttaatcgtttttatctggatagcactcttttgatcggcaatgttgaaataatgaaagcggcatagattgaggggcaataatttgaactcagtcgcaaaattataattaaaacggtcatgctacctaatatatgcccgtttattgcatcgcgaaatttgagaagacataactcattaaatgaaagggatgcaaatgaataagtttatcgctgctgaagctgcggaatgtataggctgtcatgcttgtgaaattgcctgtgcggtggcacacaatcaagaaaactggccgctgagtcacagtgactttagaccgcgtatccacgttgtagggaaaggccaggctgcgaatccggtggcctgccatcactgcaacaatgccccttgcgttacggcttgtccggttaatgctctgactttccagtccgatagcgtacaactggacgagcaaaaatgtattggttgtaaaagatgcgcaatcgcttgcccctttggcgtcgttgagatggtcgatacgattgcgcagaaatgcgacctttgtaaccagcgcagttccggcacgcaagcctgtattgaagtctgcccaacacaggcgttacgactgatggacgataaagggttacagcagataaaggtggcccgccagcgcaaaacggcagcaggaaaagcgtcatcagacgctcagccatctcgcagtgcagcgttgctccccgttaactcgcgtaaaggcgcagataaaatttcagcgagtgaacggaaaacccactttggcgaaatatattgcgggctggatccacaacaagcgacttatgagagtgaccgctgtgtttattgtgccgaaaaagctaactgcaactggcattgcccgctgcataacgctattccggattacatccgtctggtacaggaaggaaagattattgaagcggcagaactttgccaccagaccagttccttaccagaaatctgcggcagggtatgtccacaggaccgtctttgtgaaggcgcatgtactttgaaagatcactctggcgcagtcactatcggtaatctggaacgctacatcaccgataccgcgctggcgatgggctggtgtcccgatgtcagcaaagttgttccccgtagcgaaaaagtggcggtgattggcgctgggccagcagggttagggtgtgctgatattctggcgcgcgcaggagttcaggttgatgtctttgatcgccatccagaaattggcggtatgctgacttttggcatacctcctttcaaactcgataaaacggtattaagccagcggcgagagatattcaccgcaatgggaatcgactttcatcttaactgtgaaattggccgcgatattacctttagcgatttaacttctgaatatgatgcagttttcatcggcgtggggacttacgggatgatgcgagctgatctgccgcatgaagatgcgcccggtgtcattcaggctctaccgttcttgactgcccatacccgccagctcatggggttgccggagtctgaagagtatccgctgacggacgtggaaggtaagcgagtcgtggtattgggcggtggcgatacgacaatggattgtttgcggacttccatccgcctcaatgccgccagcgtgacctgcgcgtatcgtcgtgatgaagtcagtatgccgggctcgcgcaaagaggtggtcaatgcgcgcgaggaaggtgtcgagtttcaattcaatgttcagccgcaatatatcgcttgtgacgaagatgggcgtttaactgcggtgggcctgattcgtaccgccatgggtgagccggggccggatggtcgccgtcgtcctcgtccggttgcgggttcagagtttgaattgcccgcagatgttctcattatggcctttggtttccaggcgcatgccatgccgtggttgcagggcagcggaattaaactcgataaatggggcctgattcaaaccggcgacgttgggtatttacctacccagacgcatctgaaaaaagtctttgctggtggggatgcagttcatggcgcggatctggttgtcactgccatggccgcaggaaggcaggcggcgcgcgatatgttaactctgtttgatacgaaggcatcgtgatgaaatcgttaattatcgttaatccggctgactgtattggctgccgtacttgtgaagtggcctgtgtggtcgctcacccttcagaacaggagttgaatgccgatgtctttttaccccggctgaaggtacagcgactggacagcatcagtgcgccggtgatgtgccatcagtgtgaaaacgccccttgtgttggcgcttgccccgtgggggcgctgacgatgggcgagcaggtggtgcaggccaattctgcccgttgtattggctgtcagagctgcgtcagtgcgtgcccgtttgggatgatcaccattcagtcattgccgggggatacccggcaacaaatcgtgaaatgcgatctctgtgaacagcgggaagaggggccagcctgcgttgaatcttgcccaacacaggcgctgcagttgcttactgaaagagaactcaggcgagtccgccagcagcgtattgttgccagcggtgagaatcctctctgaaagaaatctccgcgctgaaaggcgcggagaatctattagattgcccaaccacccgcgtaaaatgcgaccagtgcggcagtaatgatcaccgtaccaatattcagcttttgccattcgcgtgcaaagacgcggcctacgaccagtgtcacaaagcccagcataataccggtaacgatattacaagtcagaacgatgaacacggcacacaccaggccagccatagcgtcaataaaatcattgaaatccagcttcgagacgttacttaacatcagcaaacctacgtacatcagagcgggtgcagtggcgtaaccagggatcaaaaatgacagcggtgataagaacagaatcagcaggaataacgcccccactacggttgcggttaaacctgttttacccccggcggcggttcctgccgctgattcgatataaaccgctgcgggcgctgcgcccaccaggccggagaatattgaacttactgagtcactggtcagggctttgccgccgttgatgatctggttgtctttatccaacaaattcgcctgaccggcgacggcacggatggtgccagtagcgtcgaacactgcggtcatcaccaatgccagtacactcggaagtacagttggctggagtgcacccataatatcgaggctgaaaatcagagacttaccatcttcgccagtcaggcttggcatcgccaccagaccgtggtatttcaccgctgggtcaaagattaagccgatgatcgaaattgcaataatcaccaacaagatcccgccgggtacgcgacacttctccaggccgaagatgaccgccagccccagcaagctcatcatcaccgggaaggaggtaaacgcaccgagcgcaactggcaagccttcaatcgggtttttgataaccatacccacaccgttagcagcaatcagcagcagaaacagcccgataccgatacctgtaccgtgagcgatacccatcggcaaattacgtaagatccaggtacgcacaccggttacggaaatggcggtgaagatgacgcccatcagaaataccgcgcccagtgcgacaggaacgctaatttgttgcccgagtaccagactgaatgcggtaaacgccgtcaaggaaatcgcgcaaccaatcgccattggcaaattagcccataatcccatcagcaacgagccgaagcccgcgaccagacaggtggcaacaaacacagctgcgggaggaaaacctgctttgcccagcattcccggaacgacgataacggaataaaccatggccagaaaggtcgttaagccagccagtacttcctgacgaacggtactgccacgagcggtaattttaaaataattatccagcgcgccctgtggctttggtgcgtccggtgtttgtaggatgtctccagacataatgatgtcctcacgaggatgttaaagttttattattagttgcgttcgtacaccagacgaccatcaacgtaggtgcggtagatcgaacggtcatcgcccaacgtcatcatcacgaacaatttgtcgactaaagaaacagagttgtcatagcgcagctgctgtagcggagtggcggtgggttccatcaccacgaaatcagcctctttgccaggtaaaaagttgccaatcaaatcgtcaaggcccagagatttcgctccgccgagcgtggccaggtaaaacgcttcatatgccgagaggcgatagccttgtaattgcaatactttgtaggcttcgttcagcgtttgcagcatgttgaaagtggttccggcaccgatatccgttcccatgcccactttaactttcttctgccatgcttttttcaagttgaataagccgctgccgaggtaaaggttggaggtcggacagaaagcaatgctggatttggtttcgctgagacgatcccactctttttcttcgagatggacgcagtgagcaaagacacagtttttaccggtcaggccgtactgatggtaaacatccagataaccatcatggtcaggataaagcgatttcacccaggcaatttcatctttgttttcacagagatgggtatgtacccacgtatccggatattcttctttcaggcgttgcgccatcgccatctgttcaggagatgaggtcggggcgaagcgtggcgtaatcgcatatagcagacgaccatttttgtgccagcgttcaatcagttctttgctttggtgatagctgctttcggcagtgtcgagcagataatccggtgcgttacggtccatcatcaccttaccggcaatcatacgcatattgatatgactggcggcttcaaacagcgcatcaacggattgcggatgaacagtgccaaacaccagcgccgtggtggttccgttacgtaaaagctgcttgatgaagaacgccgacatttcgcgggcgtactctaaatcctcataacgccgttcagtagggaaggtgtgtttattcaaccactccagcaattgctcaccataggcccccaccatttcactttgcggataatggatatgtgtatcgacaaagcccggtactatcagtttgccgcgatagtcgcgcacgcgaatggtgtcaggaatttgatgctttccgttttcccattcgccaaaccattccacttttccctgtttaatgagtaataaaccatcctcaataaaccgcagcgcagaggcaatctcttccgggttatcgaccgtacgggtgacatcaataaaactgcctcgtaccgcttttaacgtgtgttctcctgacatcattgactcctttactgttaatccatctcttccgctgaggtaataccaggcagaacgttttcctgtcggtagccaccagggaggataatatttaataaaatcgcagttaacccgccagcacaaatagggttttcaactaatacataaatagaggctggcaatattttaaaaatttcgggatcgtaggagacgccaagccctaaacctaaagaagtggcgacaataagtgtttcacggcgctttaaaccgttggtgatgatgatgcgaatccctgcgatggcaatcatggaaaacatcaacgtcattgcgcctcccagaactgccgagggaatggtcgtgaagaagccgccaatcatcggaaataagccgaggataaccagcattaccgcgatggttcgcccgacataacgtgaagcgacgccagtcatctgaataaccccattattttgcgcaaacgtggttaatggtaatgaaccgacagcggaggcgataacagaaaccagaccatctgccagcacgccgcctttcagtcgggactgatactcttccccctgaatggggcggcgggaaaccattgccgtggcggtgatatcgccgactgcttccagcacgctaagcagataaatcgtgccaaccaccaggaactgatggaagctaaaactaaagccgtatttgaatggatgtgggatggtgattaacggcaaattgcgcatactgctgaaatccaccatgcccaggcataacgatgcgatatagccgacacatagcccaatagcgatccctcccatgcgtagcaacggactgcgacagcagttaaagccgatcaccacaatcaaaaccaataaaccaacgccgagatgttcgtaattgccgaaggtaccgctgcttttggcagcaaatcctccaccaaaatcaataatgccgactttaatcaggcttaagccgatcatcagtaccacaataccgctgacagtaggcgtaataacccgacgtaaatagggcaggataaaagaagagccgacaaccagaaatgcgccaacgaaggagacgccgagaagcgacgacatgattaactcttcgtgaaaaccgtcgcttttcatgctgctgcccagcgcaatcatgaccgtaacaaatgaaaaattgactgactgaattgagagtaggccagaaccgacgatgccgtagcggtttacttgtaaccaggtaccaataccagaggcgatcatcgccattgaaacaagataggcagttgtttcagcggaaagctgtaaggccgcacccacgattaacgcgggggttaccatcggaacgaaaattgccaacagatgggtaatggcaccaacgagagcctgatgaaagggagggcgatcctccagttcaaatataaggtcagaacctgcatggtttatatcagacatcccttcactccttttaaagtaaatttgatcatctgaattagtaaaataaattcccacgaatttggggcgcaggacgccttgagaacggcttatctcattttcgcagtcactatttagtcatcgttcaaacagagaaacaggccgccgaagcggccatttattacttatattttttccagcgcggtgagtattttctccggtgtgaaatgccattcgcgtaaccagatgccgcaggcatcgtgaattgcggtagcaatcgccggagctgcgccatttacaccgatttccgagatcgatttcgccccgaacgggccgactttatcgtcgctcggcaccagcacagcgcggaaatcacgcggaatgtcaccaattttcggtgcgccgtaactgcgtaaatcacgcgttaacgggtgaccttcggcgtcataaatgatctcttcgctcatactgtggccgatagctcgcagggtagcaccgtagatttgtcccaatgctaattccgggttgaccggtgtaccgcagtccagcaaggcgtagaatttatccaggcggatttcacccgtacgcgtgttgacggcaacttcagcgaagtttgcgccatacgggaaggcgaaatcaggcgtgatataactgccagttcccaccagtgaaccaaagccggtgccggtttcgcctttatgagcaatatccccgaagctgacttcgcctttcttgccgcgcacgacgcccggcgttgccagttgaacatctgccactgcctcacccaacatttgcgcgccgtggaacagaattttctcccgcagattttccgctgccaaacgcgccgcgttacctgagaagcaagtaccggacgaggcatatgcgcctttatcaaacaacgcatgatcggtatcaccggagataacatgcacgtcctgcggtgggcaatgcagcacttctgctgccagtttcgtcaccacagtatccagaccagtaccaatatccgcaccgccagaatgaacgataaaggtgccgtccgattccagtttgatcatgcagttagcctgatcgatatccgggatacccgatttctgcatgataatggcgacgccgcgaccgatgtgccagtcaccattttgcggtttcggtgacgaccattggatcatctcgcgaccctgacgcaggatctcttctagtgcacagctggcggcggaaggaacggaggtcggcgctttaccttcaccgattgcaccgagaattttcagctcttgcccttcgtgtacccggttacgttcgataatttccagttggtcgatctgtaactgttcagccagttccgctaatgccatggtgatagcgaagttacctttcggtgcgccataaccctgataagcaccatttgggcaaatgttgctgtagtaggtggtgacctggaaatcgacgttatcgcacggatataacggcagcgacagcgccggtccgttacacggtacggtgagtgagtggttgccgtaagggccagtgttggcgcggaaatccatcttcactgccgtcaggcgaccatcttttttcgctcccagtttgacggtgactttcgcgacgtgacgagaggtgttagcaataaactcttcttcacgggtgtagcggaacagtaccggacgcccggtcacgcaggttgcccaggcgcacacttcttccagcaggatgtcctgtttggaaccaaaaccgccgccaactcgctctttaatgacatgaactttatgctgtttcatgcccacgaggcgcgcgacctggcggcgtaagtgccatggtacctgggtggaggcgtggataaccagacgatcgccgtccatccgggtaaagcagatatgtgtttcagtcgggcactgctgcgcttgcgttgagttataggttcgctcaatgatcacatcggcatcggcaaagcctttgtccatatcgccaatatgaccatgaatactggcggcgatatttttgcgagggcgagaaccgatcgggaagttgatgatcatatgctcgccgcgctgggctgcatggctgttatcgtcttccagagtatctggcgcaccagcaacatacaccaccggttcatcgtgcacgacaggcgcatcttccgccattgcttcgtcgatcgacattaccggcttaagcacttcatattcaacgtcgatgagcttcagtgcttcgagcgcaatttcttcactttctgcgacgaccgcagcaacacgatcgccgacgtgacgcattttcttgccgaacatacggcggtcaagcggtgacggttccggtgcgctctgaccacccggggtatagtagatatccgggcaattcaggtgagtaataacgtgaacgacgcccggtaaggcttcagctttgctgacatccagatgagtaatcagtgcgtgagcgtgtgggctacgtaacattttaatgacgcaggcgtcagccgttacgcggtcttcaacatagcagggtttcgcctgcaccattttcgcggcatcagttttaggataatgcttaccaatgacttctaggtcgtcacggaaagtcggagcgatatcaatggtggcctgcggattatttttacgtgcaaccgccagttcaatgacctgatagtattgctgccagccagcatcgcggctgaacaaaccagaaagcgcgtcgtcgatctcttcgcgggtaggtgcggcgatgcgatcgagaagatcggtgataatcagagctgcagctggatcgttataaccagactgcaccacgccaacatcaaccattgcctgttgaaccagacttaactcgttccatttgcccagagattctgcggtacgaatatctgccttctctaactgtgcggcaataagcaaggacgcgttaacgatattaccgttaaagattattgcgtcagaaccggcaaacccgaaaccatcatcactgttgcgtacagagtgcattcccatgttaaacaacagcttttgcacgttttcgcctggattaacggttagctcctgaggcgcgccatttaaagtaaagtggatgatcatacggcttcctccccagcctgttggcagtcggcatacaggtcggctaccagaactcccgtgatatagcgtttataggccacgctgccccgcaaatcttcctgcgggaaaatggcgttggcgacagcctgttcaagtgcattgccttccagattttgtttttcgacatcatgcagacgcagtgctttactggcgacgccatccagcgcaattcgcataccgtcgtggtctgtcattgcaacggctgccgtcacgacggttaaacctgcctgagaacggctaattttgcgggtcgcacaggtgcgatacggatctttaatgataatttcggttagcaggcgatcgcatgggcaggccaggtagtcctcgattgacagcgtttcgccgttgccaaaaaccagttcagcatccagtgccaacaggacgggaagcagcaccgactcttcctggcgggcggcgatttcaccaccaatggtcgactgattacgaacatggcgtgagtaaacaaaaccgagggcttcacgcagcgctgcaggaataaatcgcgcatcacgcagtggctgcaagcgagacattgcgccaatccgcagtgcaccgttatcccagtcaacccagtccagttccagatcctgtaaggaaatggcaatctttttatcggtacgggttggtgtagcattgagtttgctgcccccggcgaaccagacggcttcatcctggtagcggcgcttcagttccagcgcctgttcgacagagtcgggcctgaaaaattgttcaatcatcttctttccttatttaaccctcttcactgcgggaagagggcatctgtcatttatgccagcgcatccatccgacgccacatactggcagcggcttttctggcttgtgcataaatggaatcgcaatcgaagttaaactgacggtcttcatagaccatcacaccattgaccatcacgctgtgaacgctgcctgagcccataccgaaagcgatatgcccggcgatattgtctgccagcagcggcgtcggcgagttgtaatcgcaaatggttaaatcagctttgtaaccggcttccagaagcccaaatttcgcgccaaagttgcggctcatcagttcgttaccgttagtcagggctttggcaaaactgtcaggccacagcggaccacccgcatcgcgatgtttaaagaaggcaaatttcatctcttcaaacatgtccgaaccaatgccgtccgttcccaacgccagattgcggatgtcgctaaggtgatggttgtagccgacatggttgttcatgtttgaacgggcgttatgcaccaggaacgcatcgcgctgattgagtagggtgatgtcatctttcgacaagtacagcccatgagcgaccagcgttttgctgtcgatgagatcgaattgcgccagtcgtgccagcaggtctttgccgtaccagtggtgactgtaggaaacgtcgtaaaggtcttccgcagcgtgaatatgcaaaccacggcctgtggctttcacggcttcacgcagcatctccagaccggcatccggcacggtaaacggcgcgtgagcaccgatatgtgcttccaccagatacggctcgcttgtcgctttcttcgcctcatcaatcaaacgggcgaaacggatgttttcttctacaccttcctgcaactctttgatgccgttgttacggtcagtagtttcaaaacaggtcatcgcgcgcaggccaacttttaaaaatgcgtcgcgcaatgtggagagcgacccgccgatatacgccggagaggcatggtgatcgataaccgatgtacatccgctcttaatcgcttccagggaacaaatcagtccgctgtaatagagcgactcttcatcaagggcgcgatcgagccgccaccagagatttttcagcgttgagatgaaatccgggcaaggggcgatgtttgccataattccgcgggaaagccccgagtaaaaatggttgtgcgagcagacaatccctggcatcacaatccggccatgcatctctttgaagctggcgtcggggtagcgttgcgtcagggcatcgccgatagcgacaatcacatcgttttcgatggcgatatcaacgccttcctgcacttttgccgggtgtagctgtaccgcagtgacattcttcagaatcaacatgattacacctccacgcggcccagcagataatgatgatgctggtggacatggctgatgatgcggcacatatcgttcagctccggtggtacgttgttaaactgacctttgctgtcgatgtttaacacccagctttggttattcagacgtactcgtacccggcaatcttccacaaggaagcctgggttgctgctgttatcaaagtcttgcgccaggctgaagacggtgattttgtctttgtacggtttaccgttccacggacagaactgagcgcagttgccgcattcgttacagtaagcgtcgaggtgcagcgtctggaaacggttctggaagcctgggaccgcaatggagacgttggcgcggttcgggcagacatccacacacttgctgcaaacgtagttacattcgaggcagcgagcggcttcctgggcgacaaacgcgtcacgatcgtcactgttcaccagcgtgatagagatatcgcctttacgttgatagatttccgctggattgacgttgttccagtatttatcgttctggtgggaacggatattttcccgactaaggatggcatcggtcgcccgacgcgcggttccgacagcagcgacaatggaggatggtccgcgctgtacgtcgccgatcataaagacgtcagtcagacgagtttcgccattatggtcgacgtctggccagccgtttttgtccagcggcacgcccatcgcattcagggcttcagtatcctgctgttcaccaatggcggtgatcaggctgtctacaagcagtgttactgtttcattggtttcaaccggacgacgacgacctttctcatccggttcgccaagcgacataacgcgcaaggttaaggtgccatcagcatcgaaacgttccggattattcaggaaacggaactctacgccgtcgtgcaacgcttcttcatactcttcgcgccatgcgggcatctcttgtagtgaacgacggtaaacgatcgttgctttttctacgcctggaacgcgtaacgccgcacgagcgcagtccattgcggtgttacccgccccgacaacgaccacatgtttgcccagcttgagcgctgtacccttgttgtattcacgcaggaaggggagtgatttccagacattttggttgtcgcccgccagtttcacaccgctatttttatcagtgccggtggcaatcagaacatagtggaagccctgattttttaactgctcaatggttaaatcgggtgagcagccatactcaaatttcacgccgtgagcggcaacaaaatcgatatcgtgctgaattaactctgcaggaatacggaactgaggaatgatatttttcaccacgccgcccgcattggcttcgcgttcaaacagcgtaaccggatggcccgctctggcaaggaagtaacctgctgccagacccgccggacctgcaccaatcacggcaaccggatggcgtgaaccagaaccggctggtttgtgccagcgttgcttatattcatcccaacctttttccagcgcgacttttttcagttcgcggatattcagcgcactgtcgtaatccaggcgggtacagttgtattggcactggtgatcgcaaatatgaccggtaatggcgggcagagcgttgcgttggtagatgagttccagcgcgtcggcatagcggtgttcgccaagcagacggatgtattccggaatatcttgcttgatagcgcaggcagtaacacagggggcaacgtagcagtcggtcagcggcaggtcttctgccacttcaatacgctcttctggcttccagtgtttctgggtgtattccatggttaacgcatctgctgccagtctgttcagtcgttcgacgtcaacatggtcaagtccccaggcgtcggagccttccagctcgcgcatgcaggcacttaagcgcagatagccgccaggtttcagcaggtcggttgccatagtaatagggcgaatacctgtatcaaaaatatcgcggatagtcagctgactggcaccaccggaataagaaatgggcagtttgccgtcaaaggcgcgagagagaactgctgcaacattgatggagagcgggaacagcgcacggcctgacatatacatctcttcaccaggcagtgcgcctttattgttgatggtgccgagagtgttagtcagttttacgccaaagccgagtgatttttcttttgccagtgccatcaggcgttccagcatttccagtgcttgcgtcagcttgaggtcgtgatcaaatgactcttcttttaagcctatgtaaccgaaaccgcagacatcgaggatctcacgaacacgcgcgtaccccagtaaggtcgggttaagtttcacaaaggtgttgagccctttttcttccagcatgtagcggcaaatggcttcgatttcatgcggaggacagccgtgcatggtggagagggtgacgccatgcaccatactggtggggatgcgagcgggtaaggcttgcaagctttcgcgtttttcctgcaatccgtggcgagctaaaaatgcgtcatcctggagtaatttattcagcgtatcgcgatattgagcgaatttcggatggtcagatgcgtccatcatattgtcgatgaactgttgcatcggcggttgcttaataccttcgaggttgtaaccgacgctcatattaaagatgaacgatttaccggaatcagaaggctggaacatcgcttcgagaaggtgcagggcaaaccaggctttgaggtattcatcccaggctttaagcagggtaaattcggtagaccattcggtgttaaagcactcgtcttcggcatcgatacagggcttttccagctccaggcggtcaagaatttggacggtttttagttcgatgaagcgtccgccagtcagccaggaagtgacaatattttgcgcgagctgcgtgtgcgggccagcggcagggccgacgggagtggcacaggtttcaccgaagacgctaacagttttaccttttacaggtgagtaaaactgttgctcgggaataccaaagattgagcgttgttgttggtattcatcaaatatgcgcgtcaaaagttcctcaaacggaatgggacgcataatatcccccataaccctctccttagcttatacagatatcattgagtgaccggtgttgagaaatccggtggtttagggggatagagcaacaatcgcaccactcttgccaggtttggcgggaaatataaaaaaatgtgaggcggctcgaaacttaagggctttttgtgaatgaactcacaggtgctaaatgagaattaaaatcactcctgaaaattattattgccagcccatttatcaatttttctcttttctcaaaatcagtgattccttatcattatgataatgagtgccggaaggattaaatatttgaacgcaatcgtttaactacgttttctaaatttcagtatacctttccttcgctgtaataaagtcgtccggagtatcaatatctaaaattatttctgcattttctatttcgacggaataatgatctcccataaggagtgcctgacgcatattggtgacattgggtcgttggattgcctgcatcaggcatggttttgacactaaaatcggatggccggggatgccattatggagtggcagtattgcgccatcatttcgtaacgaccagatttttctaaaaatatcgatggtgagggttggcatgtcaccgtgggtgagaaaacaatgttctgtttgcactgcgggtactgcggccttgacggatgttagtaaaccctgcgcataatctgggttgtgaataatagtgatattgctctggttcgcataacgttcgtgcagttcattaccacgatagccggtgactaaaataattcggctacaaaactgcaacgcatttttgatacttgtatcaagaattgttccctgttcccagggtaacatcattttccattgccccattcttgatgataatccggcagcggtaattatacagtcgatggctgacatagtggttccattatttataggggctaataacgcctgataattgcgttacttcctgatggattaagttggggataatttatcccagagaggtcataaagactcgtgaaaagtatagttgacccatcggcattagtcattgatttaggtgcgcagaaacgtcccactgtgatttctgttgttggtgctggggggaaaaccagcttgcttttttggctggcagaactgctccaggctagcggcaggcgtgtgttaatcacgacgacgacacatatgtttatgccaacgtctcactggcccgtggttttctgtcgtgatcccgccatgcttcctcatgcgtctcttacatcccccatttcattttgttttcacagctggaaagcgaaccagggaaaagtgcagggatttacgccagaagcgattgatgcactggtgcaacgaccagagtgtgacgtaattctcattgaagcagatggctcgcgtggaatgccgttaaaagcgcctgatgagcacgaaccttgcatacccaaaagcagttgctgcgtgattgctgtgatgggaggacatactttgggcgcgaaagtgagcacagaaaatgtccatcgctggtcgcagtttgctgatattaccgggttaacacctgatgcaaccttgcaactgagcgatctcgttgcgctggttcgccaccctcagggggcgtttaaaaacgtaccgcaaggttgtcggcgagtctggttcattaaccgtttttctcaatgtgagaatgcgattgcacaaagcgagctccttcaaccgctgcaacaacacgacgtagaggcaatctggctgggcgatatacaagaacatcctgcaatcgcgcgcagatttgtgaattagcggcccgggtattccgggttactgaaaggatatccattgaggttggtatgaatattttcacagaggctgcaaaactcgaagagcaaaattgtccgtttgctatggcgcaaattgttgatagccgaggctcgactccccgccattctgcacaaatgttagtgcgcgccgatggttctatcgtcggtacaattggtggcggaatggttgagcggaaggtgattgaagagtcgcttcaggcattgcaggaacgtaagccgcgattattccatggacgtatggctcgtaacggtgcggatgctgtcgggtcagattgtggaggtgcaatgtcagtatttatcagcgtccatggtatgcgtccacgtctggtgttgattggcgcggggcatgtcaaccgggcgatagcccagagtgcggcgctattaggatttgatattgccgttgctgatatttatcgcgaaagcctcaatcctgaactattcccaccatcaaccacgcttctccatgctgagtcgtttggtgcggcagtggaagcactggatattcgccctgataattttgtcctgattgccacgaataatcaggatcgtgaagccctcgacaaactcattgaacagcccattgcatggttggggttgctggcaagtcgtcgcaaggttcagcttttcctgcgtcaattgcgtgagaaaggcgtggctgaagaacatattgcccgtttacatgcgcccgttggttacaacataggtgcggaaacgccgcaggagatcgccatcagcgtgctggcagaaatattacaggtgaaaaataacgcgccgggtgggctgatgatgaaaccttctcatccttccggacaccagctggtggtgattcgcggtgcgggagatatcgccagtggtgtggcgctacgtctgtatcatgcgggttttaaagtgatcatgctggaagtggaaaaaccgacagtgattcgttgtaccgtggcgtttgcccaggccgtgttcgatggcgaaatgacggtcgaaggcgtcactgctcgcctggcaaccagctctgcggaagcgatgaaacttaccgaacgcggattcattcctgtgatggtagatcccgcctgttcattgcttgatgaactgaaaccgctttgcgtggtggacgctattctggcgaaacagaatttgggaacgcgggcagatatggcaccagtaacaatcgcgcttgggccgggctttactgctgggaaggattgtcatgcggtaattgaaacaaatcgcgggcactggctcggtcaggtgatttactctggttgtgcgcaggagaataccggtgttcctggcaatattatggggcataccacccgacgggtgatccgtgctcctgctgcaggcattatgcgatccaacgtgaaattaggcgatctggtgaaagagggcgatgtgattgcctggattggtgagcatgaaattaaagcaccgttgacggggatggtgcgtggcttgttgaacgacggcctggcagtggttggtggttttaaaattggtgatatcgatcctcgtggtgaaaccgctgatttcaccagcgtttctgataaagcccgggcgattggcggcggcgtacttgaggcgttaatgatgttgatgcatcagggcgtgaaagcgacaaaagaagtgctggaagtggcttaaatgaaaatggccggatggtattacccacccggcctgagactgatgacaaacgccaaattgcctgatgcgctacgcttatcaggcctacaagtgcattgcaatctattgaatttgcgatgttttgtaggacggataaggcgctcgcgccgcatccggcatcaacaaagcgcacttacttgacaatctttggccggatggtattacccacccggcctttaaattactgacaaatcaccgttcctgttttgccttcaatcccttctttcgctttgctcaatacggtaatcagtgcttcacgacctgcgcgagagcgagcaaacgaggcggcagcttccactttaggcagcatagaacctttcgcaaaatgaccttcttcgataaagcgttcagcatcacttaatgacaggcgatcgagccactgttcattctctttaccgaagttaatggccactttttctaccgcagtcagaatgatcagcatatcggcatcaatcatttctgctaaacgggcgctggcccagtctttatcgataaccgcgctggcaccacgcagatggttaccttcacgaataacagggataccaccaccgccaacggtgatcaccacctgacctgcatctaccagagctttaaccgtttctttttcaatgatatcaaccggttttggcgaggcaacaacacggcgatagccgcgaccagcatcttctttcagagtgtaaccctgttttgtcagttgctctgcttcttgctcggtaaagaacgaaccgatcggcttggtcgggttgaggaatgccggatcgttagcgtcgacttcgacctgagtaaccagcgttgctacaggtttattaatgccccgagaaagcagttcttctcttaaagcgttttgtagatcgtaaccaatataaccctggcttaatgcaacacagacagacatcggcagcattggcgagtgcgcttcagtttttgcggcagcttcaaaggcctggttaatcatgcccacctgcggcccgttaccatgagtgacgataacttcatgtccctgggcaattaaatcaacaattgcctgagaagtaatttttaccgctttcatttgcccggccaggtcatcgcccagcgcattcccgcccagggcgagaacaattttcttactcatttttcctcactcatcattcttgattgtgtatagatccctggcagtggttagagcacgggagggacaaacggtttgcgtcgcaggaaacgacctcgcccggctttgcctgtaaaggtgccgtcacagaaaatcgtttcaccacgggataaggttctgacaatcgcgccctgacaggtaaaaccctcccatggcgagtagtcggcgttgtcgtggagatggcgatgctgaatttgttggctctgacgtgggtcgataatcaccacgtcgccgtcggaaccgggcgctaataatcctttttgcggccacaggccaaacaacctggcgggcattgcgctggttaattcaacaaagcgttccggtgttatacgtcccgtcatcacgccactggaaaacagtaactgcatgcggttttccacaccgggtaagccatttgggcagcgactgaaatcgcctttagaaatttgcaggcgttgagccatcgagaaggtgcagtgatcggttgccaccacgtcaatcgcaccatcgctgatgccacaccacagtttgtcctgctcgcgtacgttacgcagcggtgggctaagaatgaacttcatgccatcttctgtatcgtaactgcgttcgtccaacaggagatattgtgggcaggtttcaacccagactggctggtgattcgcacgggcaagacgcagataatccagacctaagccgttagacaggtgcacgatatagagcggggcgttaccggcaatttgtgccaggttaatcatgcgggcgatggcttccgcttcgcattccagagggcgactcaaggcatgatagcgcggcgcggttaaccctgcggcgataaattccgcccgcttgctggcgatagccgcatcattttccgggtgcacggtggtcagcgcgccggattcatgcaagcggcgtaatgcctgcaaaacctcgtcatcgttgagtttgtattgataggttaaatagagtttaaaactgctcagtccttcctcgaccatcatcgggatttcgtcgaggattgcgtgattaatgtgctggatcacaccgtgaaagctgtaatcgatgaccgctttatgggcggcataaccacgataaacctccagttgatggcgtaaccgacagccgtttgggccaaatcccatatggtcaataatggttgttgtaccgccacacgcagctgcgcgggtaccggtaaaaaaatcatcacaactgcgcgcgatgccgacatcaatattgaaatgcgtatggacatccacgccgccagggaaaacgtaacagccagtggcatcaatttcttcatacgggagctgcggcgaaatattgttgcccaactggcgaacaatcccgctttcaatcagcaaatcctgtttggcttgtccatctgcgttaacgacagtgccgtttttgatcaatacgcgcatagcaaactccaaaaaccctccggcgaaccggaggggaataagtgaagagtaattactctgttgccagccagcttaacgggattgcagcgtacatcgcggcacaggtcaccaggtgagatttccaggttttttcgttaggtgcatgcgcttcaggttctttacccgggccaaagccgatcaccggaatgccgtgacggcccatgatagatacgccgttagttgagaaggtccacttatcaacaaccggcgctttgccaaacagcccttcgtaggcattcaccagtgctttaacggtgaagtgatcttcttccactttccaggtcgggaagtagcattcggttgggtaaaccaggccagtccaggacggacggtcgtagttgtacatagaaacaaccgcgttagctttctgtactgcaggcagggcgcggatttcgtccagcgcgccttcccaggtttcgccccaggtcagacgacggtcgattgaaactgcgcagctgtctgctacagcgcaacggcttggggatgtgaagaagatttcagaaacggtgagggtgcctttgccgaggaattcgtcataacccagacgttgggagagttcttgtaattcgccaagaatcggacccattttgaaaatggcgttatcaccgcgttctggtgcagaaccgtggcagctaacaccctgaacatcaatacgaatttccatacgaccgcgctgaccacggtatacctggcagtcggttggttcggtactgaccacaaattccgggcgaatgccggattgttcaataatgtactgccagcacagaccgtcgcagtcttcttcctgcaccgtaccggtaaccagcagggtatattcatcttccagaccgaggtctttaatgattttaccggcataaaccatagaggccatgccaccttcctggtcggaagtaccgcgaccaccaatcagttcatcagtttccatgccttcgtacggatcgaagtcccagtttttgatgttgccaatgccgacggtatcgatatgagcgtccattgccaccagacgcgggccgtggccgatataaccgagaacgttgcccatcgggtcgatttcaactttatcgaagccgactttttccatctcttctttaatacgatgtactacgcgtttctcgtcgcagctttcactgggaatagcaaccatgtcgcgcaggaagcgagtcatatccgcctggtaatcttttgctttttcaagaatcagtttgaatggaatattcttagccattatttttctccagattttttactccccgttttgcagggagcagttccaatagggtgattaaggtgctacagcgtgtttgccttcccagacaacttcgcggtagtgcttcacgtcggtgtcgccttcagtgctgataaccagcaccacggcatctttgttcagcgccagtttttccatcaggctttgacgttgcgggtgataatgaaccgctgcgagaacgcccaaaccgacagcgccggattcaccggagatgatgcgcgggtcgttgccgtacggattacccagcacgcgcatacctaatgcggcaacgctgtcctggcaggagatgaattgggtggcgcagttacgtaggatttcccagcccagcgggttaggttcgccacaggccaggcctgccatgatggtggccatatcaccgccaacgttgacgatgtcgcctttgacgccggagcgataaatacagtcagctttgtcaggttcaacaataatgctgtgcagattttgcgggctatagacgtcgaccagataacccagcacaccaccggccattgctccgacaccggcttgcagcagaacgtgcgtcggggttacgcccatttcacgcatttgctcgacggcttcatctgccagggttgcgtagccttgcatgatccaggttgggattttggtgtaaccttcccatgccgtgtcctgtaccacttcccagccgtgctgctgcgcgtgttgcatggtcaggcgaacggtatcgtcatagttcatatccgtgacgatgcactcggcaccgaggttcagaatggcgtcaacgcgttcctgagcagaacctttcggcatgtaaatcaccgcattctgtccgagttgctgtgctgcccacgccacaccgcgcccgtggttgccgtcggtggtggtcgcgaaagtcattttttcgccgatggcatttttcaggtgctcaaatgacagcgtttcgatatcaagatgatatttttcacacaataattgagcgatggcgtacgcaccgccaagcattttgaaggcgttcagaccgaatcgttttgattcgtctttgacgagaattttcttcacaccaaaaaggtttgcgagatcgtccagcgcacaaagcggtgttgggcgataaccagctattttctggtggaactggcgcgccagtttggcctggctttgcgaaaagagcggtgatgtttcgccgttgaaaaatttgttatcggcgatatcaatcttcaatgagaaaacggacatatcctatccttttggcctctggaaatagagggccgaccagctgatcggcccgaggggttatttcacgcgttcttgcgcttctttcagcagttgctcgagcagtgcacctggtttggcgtatttacgggacaggatcatcgcggcgatgatataaggcttccagctggcttctttgtaggtagcgatacggtatttttcgaatacgccttcagtcacttcaccttctttacaggatacgccgctgatatcagctggcaggcagtgcatgtacagggcttcgccatcacgggtcagttccatcatctcttcagtacaatgccagtctttgtgttgcgcgttctgtgccagacactgtttttccagtgcttttaagccttcgtgatcgttcgcacgcagcaattcagtacgctcttccatcactttgtaaggtgcccatgacttcggataaacgatgtctgcgtctttgaaggcttcttccatgctggtgacctgacggaagctaccaccggaggctttagcattgtttttcgccacttcaaccacatccgggatcaggtcgtagccttccggatgggccagggtgacatccataccgaagcgagtcatcagaccgatgatgccttgtggtacagagagcggtttgccatagcttggagagtaggcccaggtcatggcgatttttttacctttcaggttttccagtgaaccaaagtgttcacgtaaccacgcgaggtcagccattgactgagtcgggtggtcaatatcgcattgcaggttcactaaagccggacgctgtggcagtacaccctgcttgtaaccgtcatcaagtgcagcgccaacttcacgcatataggcgttgcctgcgcccagatacatatcgtcgcgaataccaatagcgtcggcgcagaaggagatcatattggcggtttcacgcacggtttcgccgtgagcgatttgtgatttgccttcgtcgagatcttgttgtgcaaggccgagcaggttaagcgcggaagcataagagaagcgggtacgggtggagttgtcgcggaatacggaaatacctaatccactattaaagactttggttgagatgttttcagcacgcagtgcttttaatgctgcggcaacgtccagtacttgtttcagttcatctggcgtctgttcccacgttaacaaaaaatctttctcgtgaaggtgagaggtcagcgaattgatatccttaatcagctcattaacagttttcatcataaagtcccggtagtggaatgacaggcaaagtggtttatttcactgtgacttgccaaagtgattggtgttttcacagctatacctgggactaacaataagtgtgccagaattatccgcgcggctgcaaaagactaatttgacggataatgtgtggggttgatcacaaattgatgccagcttctggttgtttgtaaaatacgaaaacgtttggctttttttatcgcgttatttatttgctgctaagtatcagaaataagataaaggggcaggctatctctcttcagtttgataaactcaccgccgtaattctcatattgatatagaaatgtgatatctcttccataatttcattagaaaatgataaaaatcttatgtttttatcaaagccaatttcgcctgagttaatatcatcatgatctgtgaaccatcaacgtcttcaatgatcgacttttaagtaagtctggaaggtaaagctatggagcttgctactacgcagtcagtattgatgcaaattcaaccgacaattcagcgttttgccagaatgcttgccagcgttttgcagcttgaggttgagatcgttgatgaaaacttgtgtcgcgttgccggaacgggcgcgtatgggaagtttcttggtcgccagttgagcggcaactcacgcctgctccgccacgtcctggaaacgaaaactgaaaaagttgtgacacagtctcgcttcgatcccctttgcgaaggttgcgatagtaaagaaaattgccgcgaaaaagcatttctgggtacgcctgtcattttacaggatcgttgtgttggggtgataagtttgattgccgttacccacgagcaacaagagcatatcagtgataatttacgcgaattttctgattatgttcgccatatatccaccatttttgtttcgaaacttctggaggatcaggggccaggagataacatcagtaaaatatttgcgaccatgatcgataatatggatcagggcgtattagttgtagatgatgaaaatcgggttcagtttgttaatcagactgccttaaaaacacttggtgttgtgcaaaataatattattgggaaacctatccgtttcagaccattaacatttgagagtaattttacccatggacatatgcagcatattgtttcatgggacgataaaagtgaattaatcattggtcaattgcataacattcagggccgacaattatttttaatggcgtttcaccaatcgcataccagtttttctgtagcaaatgcacctgatgaaccgcatattgaacaattggttggcgagtgccgtgttatgcggcaattaaaacgactcattagccgtattgcacccagcccatccagcgttatggtggttggtgaaagcggcacgggtaaagaagtcgtcgcccgtgcaatccataagttgagcggaagacggaataaaccctttattgctatcaactgtgccgcgattccggagcagcttctggagagcgaactgttcggttatgttaaaggtgcatttactggcgcttctgccaacggtaaaacagggttgattcaggcggcgaatacgggcacgctgtttctcgatgaaataggtgatatgccattaatgttgcaggctaaattactgcgcgctattgaggcacgtgaaattctgccgattggtgccagtagcccaatacaagtcgacattcgcatcatttctgcaactaatcagaatttggcccagttcattgccgaaggtaaattccgcgaagatctcttctaccgacttaatgttatcccgataactctgccaccgctgcgtgaacgtcaggaagatattgaactattggtgcattactttttacatctgcatacccgtcgtctgggatcggtttatcctggcattgctcccgatgtcgtcgaaatattgcgtaagcatcgttggcccggaaacctgcgcgagttaagcaatttgatggaatatctggttaacgtggttccttcaggtgaagttatcgacagcacgctattgccgccaaatctgctgaataatggcacaacggagcaaagtgatgtaacagaggtcagtgaggcgcacctgtcactcgatgatgcgggcggcacggcgctggaggagatggaaaagcaaatgatccgcgaggcgctttcacgtcataacagcaagaagcaagttgctgatgaactgggcatcggcattgctacgctctatcgcaagattaagaaatatgagttgttaaacacataacctcagtgaatccggcctgaattcaggccggatatccttttacttcgttttctcgcaatccagaactgtatttacaatcatctgataccccgtgcagcgacaaagatttcccgccagtccgcgacgaatttccgtaatggttaatggcttctcgcgtggtttcgccagcattgccgtggtagccataatcaggccaggcgtacaaaacccgcactgcactgcgccggatttcgcataagcctgctgaacatgagaaagttttccgcctttcgcttcaccttccagcgtgcggatctcttttccttcagcccaggcggcaaggtataagcaactgtctattgctgtgccgtcgaccaacaccgtacaggcaccacattcacccacgcagcacccttgtttgacacttagcagtccttgttcgcggagtaattccgagagcggcgtgcctggtgcggcgtgaagctgaaaaggcatcccgttaatggtgcattcgatggtaattgtttcgctgtgattcattgcaattttccccccgccgcggcgacggcttcgctaatcacttttttggtcatcgtctggatgagatgcagacgaaactctttactggcccgccatgaagaacgcggggcgacatcttgcaggacagattcgctgatagcttccagcgtttgcaggtttaatggcgcattttgtgcagtctgttcggcatgttggcagcgaatcggcgttggcgcggcaacaccaaatgccaggcgtaattcgctgaaattgccgttatccagtcggcaatgtgcggcgcagccaatcgttgaaatatccattgcgtcgcgcatggcatatttaaaatgcgcgctgcccgcgtgttctttcggctgtggcggaaaatgaaaggcgacgaggatttcgtcatgctcaagagacactttgcccggcccggtgtgaaagccattaatcgggacgaaacgaacaccgcgcggggagtggatctccagtttcgcgtcataaattagcgttggcgtggcagaatctgcgctggtggcaccgttgcaaatatttccaccgtaggtagcgacgttacggatctgcggtccagcaatggacgtggccgcagcacataacgccgggagatgacgttgagttataggatcttctattagctgggtaaatgtcgttgcagagccgatacgtagcgagccatcttccgccagcgtaattccccgcagctccgccagattatgaatatcaacaatatggcgataacggtcattgtgatggtggagctgaatcagtacgtcagtgccaccggcgagcagtttggcctgcgggttgtcagccagcaggttgatggcatcggcaagggttgctgcgcgatggtaagaagcaaaatcaaacatgatgttatcctcaaatcaatcctgccagatggaactcttcatataaccgttttggcgtcagcggcagtgtattgattgcaacaccggtagccatcttcaccgcgttacgaatagcagcggcaacaggaattattggtggctcacccagtgacttatgtccgtatgcggattgcggctcattgatttcgacgaacgcgctttccagttgtggcagatccggcatggtcggcattttgtaatccagcagattggggttacggaccacgccgcttttagcatcgatgatcatctcttcaaatagcgcccagccaatgcccattcccattccgccgtgtacctgaccttctgccagcagtggattaagaatatgccctgaatcatgaacgttgaggatgcggttgatggtgactttgcacagcgcaatatcgaccgtcagatcaacaaaggtacagccaaacgccggtgggttagtggtggttttgatggagctttcagcagagagctgcccgccgcgttcagggtggtagaaagcgtccatcgccaaatcttttaacgacattaacggctcttccggtcgttcaaccagcacgatatggccttttatcagggtcagattcatcgctgactgatgtagcatgactgcggcgtgagcgatgattttctcttttaataatagtgccgcactgcgcagcgcaggcgcggcaacatagctctggcgtgaggcaaatgcgccgggatcgaacggcgtaacgtcggtatcttgagttgaaataacgcgaacgtcgctgaccggaacccccacggtttctgccaccatttgcgagaagacggtgtcggcaccctgaccgatttccgtcgcgccgctttgcacgttgatggttccatcctgattcatcagaaggcgcgcgcctgctatttctacgccgacaggccaggtgttagaggtgtagctaaaacaggcgacgccaacgccgcggcgcaaattgccttgctggttctggcattctgcacggcgtttttcccattcaaagattttccggcctttttcaagacactccggcaaccctgcgctgtaaatacgtttgcccgtgagcggattagcatctccttcgcgggcggcgttgcgtaaacgaatttcaacaggatcaatacctaacgctgtcgcggcgtcatcaagcatagactcaacggcaaatacgacttgtggcgcgccataaccacgcatcgcaccagccgaggggaggttggtatagcaggtctttgaactgtaagcgtaggcacaacgaggataaaggtaagcgactttattcccccccgcagaagcgatggagtgcccgtgagatgcataagcgccggtgttagacagaacatccagactataacctttcaatgttccgtcgcggttcacgcccatttgcccgtcaatggtaaaagcgtggcgggtacgggttgcgaggaaacactcttcacggctaagggaaactttcaccggaatgccgccaagcttgctggtcaggaatgccgccattggctcttccagtacatcctgtttattaccaaaaccgccaccgacaaatggtttgatgactcgtacgcatgaccagggaatatccagcgcctgaccaaccacgcggcgaacaatgtgcgggatctgggtgctggaaacgatggtaattcgcgagtcatcctccatccacgccagcgatgttacgctttccatgtgacaatgttgaataacgggggtctgatagtgcccctgtacctggtagtcggcggcatcgattgtttgttggacattacccgtcgacatcgtgctttgtttcagtaaattgccaccgttatggattggtgcagcgtcttctgccagcgccgcttctggcgtggtgataacgggtaattcttgccactcaatgctgaccaattgcgccgctttttctgccgtgagttcatcgcgggccacgacgatggcaacggcgtcaccatgatgacgaacatggcgagttagcagtgcgcgatcggcggtatcgcgcttgttttcgtcaagtgtccaggcatgcccagctgtagcgaatggaatatcaggcacatcttcccaggtaaaaatcgccagtacgcccggcaaacttctggcttgttcatcattaatacttacggcataaccatgtgcgatagggctacgtacatatttcgcataacacatgcccgccataacataatcgtcagtatatcgtgcccgcccggtgaccttagcaatggcatcgacgcgcatgcatgattcacccgtagcggttgcttcccgcgcttccatagaaatcccctcgatttgaacatttggttcttatggcaaagatttagtctaagcaggcaagatttacgccagaaacgacgataagcgttaggggaggtaggaagtgtgatgacgttaaaaaaacacagatatgatacgaaacaggactctgaataggggcagtgatacgtatcaatatgagtggcgataaaatcaatgtgataaattgggattattacgcatcaggatgggaaatagggtaaaaagtcaggaagttcgatacctctacagcgaatattttgctgatgatacttccctttgccaaatgaaattaacctctttctctattaccacgtttttccagaagcaagagattgggtatcaagaggctggctgctatgataaggcgtcttgttttttaagcgaggaaagattttgagtgcgggacgcctgaataaaaaatctctgggtatcgtgatgttgttatcggttggactgcttttggcgggctgttcgggtagcaaatcatccgatacaggaacgtattccggctccgtttacaccgtgaaacggggggatacgctatatcgtatttcgcgcaccacgggaaccagcgtaaaagaactggcgcgactgaacggcatttcccccccttacaccattgaagttggtcagaaactaaaactgggtggggcgaaaagtagcagtattacacgtaaatcaaccgccaaatcaacgaccaaaaccgcatcggttacaccgtcatcagcggtaccgaaatcatcctggccgccagtagggcaacgttgttggttatggccaacgacagggaaagttatcatgccgtattcgacagcagatggcggcaataaagggattgatatctcagctccacggggtacacctatttacgccgcgggtgcaggaaaggtggtgtatgtgggcaaccagctgcgtggctacggtaatctcatcatgattaaacacagtgaagattacattacggcttacgcccataatgacacgatgctggtaaataatgggcaaagcgtgaaggctgggcaaaaaatcgccactatggggagcacggatgcggcatctgttcgcctgcatttccagattcgttaccgtgcaacggcaattgatccgctacgttacttgccgcctcagggcagcaagccaaaatgctgatggcgaattaatcagcagtcagcagcgtggcacttgctaaggagagcgtaaggtttataatgccttacgcatctcgaagcgggcgtagttcaatggtagaacgagagcttcccaagctctatacgagggttcgattcccttcgcccgctccaatttatcttcgccgtaatacttccccattttgttgtaaataaaaagcgtttacgcaatgcaatccttttgtaacaacccaggtaaaacaccttattttcaagttgttaaataagtggttatctacgcttttaacaaacgattgatggaatattttatgaaagggaaatctgcattaactcttctgctcgctggtatattttcgtgcggcacatgccaggcgacaggggcagaagtgacgagtgaatctgtatttaacattcttaattccacgggggcagcaacagataaaatttatttatcgttaaatccagataagtatcctaattatcgtcttctgattcactcagccaaattacaaaatgaaataaagagccactataccaaagacgaaattcaaggattgctaacattaacagaaaacacacgaaagttaacgttgacggagaaaccctggggaacgtttattcttgcttctactttcgaagatgacaaaacagcggcagaaacccactatgatgctgtctggttgagggatagtttatggggctatatggcattagtatcagatcagggaaatagtgtagccgcaaaaaaggttctgctcaccctgtgggattatatgtctacgcccgaccagattaagcggatgcaggacgtcattagcaacccaaaacgactggatggaattcccgtgcaaatgaatgctgtgcatatccgatttgacagcaactcccccgtgatggcagatgtgcaggaagaaggcaagccgcagctgtggaaccataaacaaaatgatgctttaggtctttaccttgatctccttatacaagcaatcaacactggtactattaacgctgaagattggcaaaaaggtgaccgattaaagtcggttgcgctgctgattgcttatctggataaagccaatttctatgttatggaagattcctgagcatgggaagaagatgcccgattaaacacatcttccgttgcactggtgacctctggactggaacgtttgtcaaacctactctcgaagaaagactctgtttttgtctctgatttactacgcgaagctaaagtcaatgaactggatgaaactctttcaacaacgaggttgaaccacctcatagataaaggttatgaaagaataacgttacagcttgatttagggggagaatccccaggttatctggaaaaagataaacattacagagaagccgatgcggctttacttaatgttatttatcctacaaatctttcaaagataaacaccagaagaaaagagcaagttctaaaaatagttaaaaaactagcaggtccgtatggtataaaaagatacgagaaggataattatcagtcggcaaatttttggttcaatgatattaaaaccgataccgatcaaaattcgcatgcaaaaagagaaaagagcttcattccatcaacagaagcagaatggttttttgactcatggtatgcaaaatcagcagcaattgtttataaagaatcaagaaaagaagagtatttgaatgactcagtacaatttatgaatagatcattggcccaaataacaggcgagaatatgattggtgcaaatggcaggagcgtaccagaaatggcacttcccgaaagctataactatatccacaagtcgggaactttgcatgaagcgccaagccctatcattccgctaaattggtcgaaagcttcaatgactctcatgttgaaagagatgtccaaccttatcaatgatgagggaattaaatagttttcataatgagttacagcacaacgttgggtattgactgagcaagatgaacgacaaggacaacgacatcagtcttatgaggagcaagaaaatgaaagcaaattcgaaaacgatcagaaggatgaaagttaatgttcggtctgaggaaagtaaatcgaaacactcatacgtttgaaaccacttttcaaaattggaaagaaaatggcgaagatgttgcattattaatgcccgaatttagtgctaaatggctaccgatagcagaagagagtggcagctggtctggatgggtattgcttggagaaatatttcccttaatttcatctgagctcgctgggatggctttaatgccagaaacggaaaggttaataggggaatgcctcagtttatccagttccccgttaaatctaaagcatcctgaactaaaatataatcgtttgcgcgtaggtaaagtatttgatggagtattgagccctgctcaaccactaataagaatatggacaggggaattgaatctttggttagataaagtcacagtctgccaatacggaaacgctccagcgttagacaaaaaatcgttatattgctccattcattttgtaattggatttagtaaaacatgttacagaagtcttgttgatattgaagttggtgatgttttattaatctcaaataatttggcttatgcggttatttataatacaaaaatttgtgatttaatttatgcagaggagttaaaaatggctgatcattttgagtacgaggaagattttgaaacagatgattttgatatcaaaaaaaacgagagtgagatttatgatgaaaatgacgatcagatgattaatagttttgaagacttgcctgtaaaaattgagtttgttcttggtaagaaaataatgaatctatatgaaatagacgaactctgtgcaaaaagaataatatctctgctttctgaatctgagaaaaatatagaaatacgtgtaaatggcgcgctaactggctatggcgaacttgttgaagtggatgataaattgggcgtagagattcattcttggttatcagggcataataatgtcaaatagcatttcgctgatagctatactatcattatttacactattgccgtttataatagcatccgggacatattttattaaattctcgattgtttttgttattgtccgaaacgcgctggggcttcagcaagtgccatcaaatatgacacttaatggggttgctttgctattgtcaatgtttgtaatgatgccggttgggaaggaaatatattataacagtcagaatgagaatctttcattcaataatgtagcgtcggttgttaattttgttgagacaggcatgagtggttataaatcatatttgataaaatattccgaaccggagttggttaacttttttgaaaagattcagaaggtgaatagctctgaagacaatgaagagatattcgatgatgataatatttcaattttctcgttactcccggcatatgcgttgagtgagataaaaagtgcatttattataggtttttatatctatttaccctttgttgtagtggatctggttatatccagcgttctgttaacgttaggtatgatgatgatgagtccggtaaccatatctacaccgataaaattaattttgtttgtcgcgatggacggttggacaatgttatcaaaaggactcattttacaatattttgacctatccattaatccctgaggaaaaaatatggacgatattgtttttgcagggaatagggcgctgtatctgattttagttatgtctgcaggacctatcgcagttgcgacatttgttggtttattagtagggctttttcaaacggtaacacagttgcaagaacagacgttgccatttggcgtgaaattattatgcgtaagtatttgcttttttttaatgagcggatggtatggcgaaaaattatattcttttggtattgaaatgctgaatttagcattcgcgagaggatagcatgggtgaggcgatactctatcagttgcatagtctgctggctgctacagcgctctgtttttgccgattggcacccactttctatttgttaccatttttcgccagtgggaatataccaacagtagtccgtcatccaataataatagtggtatcatgtgcattagttcagcattaccactatgaattattgaacttaaatgaaatcgatattgctttgttcgctgccagagaaattatcatagggctgtttattgcatgcttattagcatccccgttttggattttccttgctataggtagctttatcgataaccaacgcggtgcaacattaagtagtactttggatccggctacaggtgtcgatacctcggaattagcaagattatttaaccttttctctgctgcggtttatcttactaaaggtggaatgaactttattctggaaactctttggcaaagttataatttatggccttcaggcaattttaattttcctaaattagagcctttattctcatatattaataacataatgactcatactatcgtttacgcaagccccgtgattgccgttatgctgggcggtgaggctgtcctgggattgctggcacgttatgcttcacaactaaatgcttttgccatttcactgactgtcaaaagtgcgctggcatttttaatattaattatttattttggcccaatactagctgaacgagtaatgccgttatcctttttcccagaacaattgcaactatacattgagaaatagagtgtttcatggccaataaaactgaaaagccaacacaaaagaaactccaggatgcttctaaaaaagggcaaattctaaaaagtagagacttaaccatctctgtaataatgcttgtgggtactttatatctcggatatgtttttgatgtgcatcacattatgtcgattcttgaatacatccttgatcataacgctaaaccagatatttgggactattttaaagctatgggggttggttggttgaaaacgaacattccttttttgctggtttgcatgttcacaacaatacttgtctcctggtttcaaagtaaaaagcaattagcaactgaagctgttaaatttaagcttgattcattgaatccagtaaatggcttaaagcgtatatttggcttaaaaaccgtaaaagaatctgttaaagcaattctttatattattttttttgcattggcgatcaaagtattttggagtaatcataaatcactgctttttaaaactcttgatggagatatcatatctttattatcagattggggagagatgctattccttctcatactgtattgtctcggcagtatgataattgtcttaatttttgattttatcgctgaatattttttatttatgaaagatatgaaaatggataaacaagaagttaaaagagaatacaaggagcaagaaggaaatccagaaattaagtctaaacgcagagagcgcatcaggaaattctttctgagcaattgaagtctgatgtcagtaatagtcgtttgatgattgccaaccctactcacattgcaatagggatatactttaagccacatctttcacctattccattgatttctgtaagagaaactaatgaggtagccttagccgtaaggaaatatgcaaaggaaatcggaataccaattatcacagataaaaaattagcacggaaaatttatgctacccatcgtcgctacgattatgttagcttcgaaaatatagatgaaatattacgtcttctgctgtggcttgaagatgtggagaatgctggacaacctgttccagatgaacagctctcttcagaagataaattcattgaaggtgaagagaaagaaatcgagaataaagacgataatttaaaaaattaaacatctgtcgtagtcagaaatttataagaatctacacgcaaaaaccgtgtagattcattatttaatgagttaaatgatcttgtgaaatgacaagcaattgatacatactcatctctttataagctggaactgtagtaacctgtgcaaattcgcgatatagcttttgctccagttctgctgtagatatatattccgggtgttcgctaaagaactgtcttgcatctactatcgcttgggattcgccacttcttttattttgattctcctttaatgaattttctctggtgcatgcagagagcaacgatatcagcgcgatggttattatgattttactattatatcctactaatgacatatcaactttctcttacgcaagattggagtttaaaataatgtttatcccattcacagagtgctataaacaactcaacagtaccttttatgttaagtttatttagggctcttattttgtgatatgatactgttttataatcaattcctttaataatggctacttgttttaacgagtaagaaacacataaccgcaggatatctatatcatcatgggtaagtgcttcttgtgtggaatacacattttgtgtatgaagattcgaaatcaggaaatgcgttaaatcagataatctaatattcttattgatcctgatgaaattgttgcttaaaaggatgtttacaggttctgtatttggtttgagatttcgatgttgatgctcatcaataacaacgaatgaatgcccaagatcaaccaacgcaactaaatcgctgtaatattctttttgggatgctaataatgcattagtgactacagtgaagtagacatcactggaaaagacttgcatatgccaacctgtactctaaaatcatttagggtaaatattacgtgtaaaagttaaaataagagtaattgttatatttgcttaacattgggggaatagggtttataccttaaattgtaaataaagttatgcatagaggcatttaaaatagtcctcgaaattataattttttattctgtgtcatcatattttggtcatgaaatttccgtcttgttacactactctaaactagagcttatggaattagcgggtgctattcatggaaaataatgataaattcttatcacaagacttattggaatcttatgccattcgtttgttgagcggaccattgaatggatgcgagtatgaaatacttaatgggcgtctacttgttatcattggtaatgatgtttcgttaggaagaagtgatgctttttctgagttaccagaaaacacaatagtcgttccttatggcgagcttacaggtagttttgagataataattactaccgaccctgatctggtagtaacattcagagaattaacagcacaagaacctgaagatagaacgttaacattgaatcagcaaatagaagttttaggtctcaaatttgctgtaaaagaaaaaaatgaagtttggcagtattcattgccaggcattattgaaaataacattatttctacaaaacaacatttctttagcagtaagctgtttaagtatgtaatgcttttttttctttttgctatcattttcattgctttttatattgttaatgccagtaatgatccgcagctgagatatatcgataaaattcttgtaaacaaaaacaggaattatgaaattttatatggtagagatcatgttatctatattaataccaatattttggatgaagcagtctgggtcaaacaagcactggaaaaaaatcaaccaggaaagccagtacgggtgataaatcctgatgatgaatcgatacgaattttttcatggcttgctgataatttccctgatttacaatattttaaacttcaactattagatgccagtaatctaagattgacagtgagtaagcaacggaacgctatcacacagcaactaatcgataatcttattaaaggattactgcaaactatgccatatgccagcaatataagtattgcggtattagatgataatgtattggaaagtcaggctattgaaacgttgtcagcgataggtctttcttatgaaaaatataaaacagctaacaatgtgtatttcaatatcattggtacgttaagtgacagtgaattaaataaaattaataactatgttgacgaatattataaacaatggggtaaacaatatgtaagatttaatgtgaatttgaaaaatcaggacacaaataatagttcatttagctacggagataaccgattcgagaagtctcaaggtagcaagtggacatttcaggaataattgaggaagacttatggcagattggaatggttatattatggacatcagcaaacaatttgatcagggcgttgatgatctgaaccagcaagttgaaaaagcgttggaggatttagcaaccaatccttccgacccgaaattccttgccgaatatcaaagtgcattagctgagtatacattatatcgaaatgcgcaatctaacgttgtaaaagcgtataaagatcttgattcggcaatcatacaaaacttccgctaaactggataaggattttattatgtcagtaagcaatatgccacctattgatagagctgagcaatcaactgctcatgaaatacagcaagcgaaagtgattgatttaaatgaccgggttctcaatcttgacaacccggatgataaaatgatctccgcttttgctaactatgctgtacaaactgaaaattggcagcaaaatgcgttacaagcattaacgtctgataaaaaaggattaactcctgaaaaattattagtcttgcaggatcatgtgcttaattataatgtcgaggtttcattggtgggaacattagcaagaaaaattgtcgctgcagttgagacgttgacccgctcatgaaatatatatcattattattgtttatcctgctgttgtgcggctgcaagcagcaggaattactgaaccatcttgatcaacagcaagctaatgatgtccttgctgttttacaaagacataatattaatgctgaaaagaaggatcaaggcaaaactggattctcaatctatgttgaaccaacggattttgcttctgcggtggattggctaaaaatctacaatctcccgggtaagcctgatattcaaatatcgcagatgttccctgcagatgcactcgtttcatctccacgagcggaaaaagcaaggctatattctgctattgagcagcggttagagcaatctctcaaaattatggatggtattgtttcttcgagagtacatgttagttacgatgttgatactggcgatagtggtaaaactgctttaccaattcatatttctgtacttgcagtatatgaaaaagatatcaatccagaaataaaaataaatgacataaagagatttattgttaatagttttgcaagcgtacaatatgagaatatttctgttgtattgtcaaaacgaagagacattattgagcaagcaccaacatatgaaattagcgaacctgtttttgcttatgataaggctatgccggtttctatcttacttgcattaatatccgtagcgacttgctggctgttatggaagtatagggccattctaactaatttagtcaggttgaaaattaagtagacatatgagaacgttatgaatcttgccctaagaaagattatatatgatccaattagttatattcatcctcaacgagtaagcttgaataatacacctattaacaatccggtgctgagatctattaccaatgaaatgattctcctgcagtataatctttcagttgaacattttaatctgaatagttcacttatttactacataaacaattggaatttacttccattgatctgtttactcagtggttgtcacttttatcgagaaaggtttgcagaacgcgggtttttttataaggttcctgatgtactaagggattatttatcagctataccgctggaaataaatgaaaaggcacgatacaaacccggcatcgctaactatcacaatatcatcacatgtggtttttcaacgttgttaccctatataaggcaacaaccattggcaatgcagcaacgatttaatttattatttcctgattttgttgaccacatacaatcgccgttaccacttgcatcaacacttttagagagaattacattttatgcgaaaaaaaatagagatgagcttgataaaatctcctgcaaatggtgttgtgattaaaagaaaaatttctgatggattgaaagaaatagtttctcttaaagaaaaaatccttcttgaaaccaccgcaaaaattcagagtattgaggaaaagagagaagaaaaatttattcaaggttattatgatggctatacaaaaggcattattgatgagatggataattttatacccttgataagcttgctatgctcagaacttgaaaaaaaaagaataaacatgataaacgatctgaagagtatattgttaaaaccttcagaagaagttgatgtttttatcaaaatttttgaaagttgggtaacaaaattaccatcaatatcaggtcctgtaaatctccatatacctaccagtttcaaagataagtctcttgaagtagagtcatattttgtcgacaaatcaatatggaatgtccatattacatttcatgatgataagcgttttgtgttttttaccgatcaatttattgctgaatttagtccgcaggaatttgtggataattgtgagcaatatttaattaataatcattgtttctcccctgacaaggttaacgaaatctgcgaacaagccagacattatttagttgaaaaaatgtttgaaacacattctttggatatgaataattctgttttggcaagccctgaggacttatagctccctggctcaagtttaatgatttgaatataatctaattgtaatattttaatcatctcatgattttttaatgcctgtggtatttttttacgcaaaaattttatttttaattatatttcattattatttcatcaatgtattctttggattttgcttataataataatggaagggatgattataaatgaatgcgttaaagcatttacactcaggatgaatatatgggaaaaattaaaattgtagtttcagatcagcagccgtttatgattgatgggataattggatttctcggacattatcctgatttatatgaggttgttgggggctataaagatctgaagaaagctatagcggagtgtaacaaatctacagcctaaatatttattttaggagaatttgcaggtggaatgatgggggccgaactcgtaaaatgggttaaatcgcataagatagatgctcatattattacatttgtagcaaagatgccgtatattgattcaataaaattgcttgaagcaggtgcgaaaggatgcgtatggaaaaccagtcacccggcgaaactaaatcgtgctgttgattcgattagtaatggttacacttattttgatagtgtacatatggattgtgaaaaaatatcttccaggtattcctctgataatcaacttacaaatcgtgagtcagaaatattacaactcatagctgatggtaaaacaaacaaagaaatcgctaatttcttgcagttaagcaggaaaacagtcgaaactcatagactcaatatcatgaagaaattagatgttcacagtggtatcgagttgatcaaaacagctttacgtatgggtgtttgcactatataaaaaaaagaggctttaggctcattttgctgaagccttacgattgtctagttcattaagcctggtatatacaatatatattttggggcatattgctgtctctttttttggttatccattgcaaaacccgcattataagtccccaggcattgccacgttactccacaacgtgaaaaatggttatataaaatctcggttcctattttaatgttcagacaagggttatctaacaaatctcgttcatcttttattattccacgtttttttaacaggggaatatgcatctggtttatctgcattaaccaataatctaaactctttatattgttattcttatctctgttcttgcctatgctatccttttttagattgctttcaacaagagcgatagctttaattaaatttggttcgattctgaacattgttcctgcttcattagagcaagagttgctggcgaaagacatttttgtaataaatatacaaaacgtgaagatggttaagaatttaacttttggtgagcgcatattttttcatgtgtgaggattgaatgaaaggaacgagatactattataaaagtatctcgttatgatttatttggtcaatcgtctaccactcaattttatagtaaggtgagataggattatcttctgaatacatatcattttgaaaaggcgccatccatgttgaaactataaatgcttgtatttgatctgtatcagtagcactggtgttgatgtgtttatctaatgatacgacttcatcacccgttgcattcgctatatttgaactttgagataaattattgataccgattggattagtcataaagctcccttttttaattgtccaggccaatggtctttacatcatacttttaactctagagcattttaaatatcttgcaataaggtgaatatcttagatatttttatctctgttgtttaaataacaagttgcatacatctaaataataaaattgcgtcaataaaaatttatcgcatacaaattctcgtcagctgctttaatttcaaaatgttgtcaattataactcgatggctttcactctcagtttctttatagtagagtttaatgttgtttttgagcgggttaggcacatacatatctacacattcttttatcacaactgcttttcgtcttctgggttcgagttgtagtgatttgtctatacaaatccttgcctcttcaattttttcattatgaaagtggactagtgccctatagtagtagagagaggctatatcagttgagtgtatcttagcctgttcaaataagatatgagatacttttgcttgtccagacagaccagttatcagtcccataatagctaaaatttttccatcgacagtggttatgtctgatacataatctaaaagctctaatgctttttgagcagcaagttcaagttcactttttccatgaagtgccaaagacatatggcattccgctagaaggcaataacattctgtttttagcgtctgtatatcacttttattttgtaatctatcaaatatagtcatggccctgtaaatgctttcaggggtgaagtcgtaaagttctttctttccggctaacatttcatctgataaataatgattcttatatccttggtcctgcttagctaatcttacagatcgttctggtttatgtaccgtttgaaggatattatctataataaattgtgatgtattatgtagttcatcaacagggagatgattactggcgatgaggaaaaggtttttagcgtcgatcaactcaatgtataaagtgttcactgcattattctggtttattcttcctgtaacgaaataatctggcttgaatctgctcaagaatgaattttgagatatgtgatcattacaaaaatttgtcgcagccatcggataggtatagagaccatcgatttttttatttgaaatgatttgcactaattcctgattaagtattaatggatccagtgtattcaatgaagtggtgaaagggaatatagctatggaatagtctgaagtattatcttcattaattttagttttgaaaacctgcccgctgaaacgataacctttccggtagattgtttctatgcaacgatcatagccaattttttcaaaaatgcagcgcaaagaatagatacatcttgtcagggactcgtcactaacaataatatttttccatactgattcgatgatcatatctttcagtacaacatgaccagcggattcaagtaatactattaatacacctaactctttctgtggaatataaacttgctcatttccttgagtaagaattccatcttccgtgagcgttaatccctcaagaaaatgatatgagaatttattttctaagtccattagttaacctctatgaaaaaattggtttcttgcatcctgcttaagcaatagaaattatggctattcatatttatgtgtcattaacgctacaggaaattacattcgacatatctatggttgtgttcactaatttatcttaggaattcagtgatgtaatctgaaatagccttattcaattttgataaagtagattgttctctaacgcattgaaaaataatgatttatagtatgctcttaactgttttaagatgctgatttaagaaaacataagaggtgctggttatagtggttaactgcactataaccagcaaatttaaccaaatgattgtaatgcttagccattatcttctgaattatcgtttaagagttcaatatatgcctgcgctttactcttaacactatcatcctcacaattgttaataatgtgatagaaacattgcattgcgttatcgatatttttagccccaatctgacattgacccatacgataaataactgaatagtcatcatacgggaagtaattgtaacttagtttgtaaaggtcatatgcttgttgatatttctttttgggctgacatactgatgcaaaatcttttagatactcatgattttcgaacgcataaatgcacaagaatttataataaatttctgcgtccgttatattacccttttcatggtagtcgaatgcatatgcatatattctatcaaggatatcaggagttaaaccatgtagtaatgccagattttctcctttcgataatgcgtgttttagttgatttgcccattcatcactattattgaatatttcaattgtttctgtgctcataatattcctctgtgatgtgtctcgtgatgccaaattattattgattgactcattgatatttttatatttatcttttttaaattatgagttttaagcttgcattgcttatggtatatttttcattattggtaaaagtactgttcactacaaactaataacatcattagttgttttactaatattcaccttattagttatcttaattacgacattacataaatgccttaatgtgtatgacctggattcatagtatcaattgccattttttcaatgaaaattaaaaaggggatttttgagaagggtagaatgtcgtttgtttttttctttattatgtctggtgacgcggggggatagaacgtctgtgcatatagtagtgaatttattcaggtctacattattctctattttggtcagttttatgagttcatttacagccatactcattaaatcatctgttatcgaaaatttatatatgctcatagcagataatattgcttgctgaattatctcttcagaaatatccgctatctttattgacaaatcatgtgttagatattttcctccaagagattcttgttcaatataatttaaaccagaccccattgtgattttaactggattaacggatttctcttcatttttcttatttttgttctcctgatcaggaactaatggttgcagtggtaggctattattaatatttcgtggcttcattttacatttctctcatttgattagagcaaaatccgaattcgcagcttctgataatgtcaaatatcaccttatggagacgttacgtagaatgactatatttgttatcggcacattaggggtattaattttagtattgatggaaggtgattattgaacagtaacatcgagtcacggtaaaaatgtgaggtatacaatggacattgaattttcgcagattcatgaaatggtctatatgcatgatattgtaaattcggactcgaaaaagaaaccaaggattccgttaaaaaaattccttaatgctgagaatgttctcacgcaaacaacatcatggacattaaattcaagatatgtgaatgttaattctgtcaataaagtcaacgtaaagagtaaagttaaaaacagttatatctcacgatctgtcaatgatgagtttagtttaacagatgatgaaatcaattcttttaaagaaacgttagtcctttcctctattgattcactgagtaaactggttcttaataatcctctttctgtattgtttacatcgactgtacgaaggaataataatcgagctaagatgaatgtcgagttcgactcatggatttgcaccagatgttgttgatacatgatattttacattgcaaggagatgtctaaaatgaaagatgttgatcaaatctttgatgctttagactgccatatactgcgagaatatttaattttattgttttatgattaacgaggttccatctttttgttatctattttagtttaccttgcacaatgcattattgctctgttaccaatgctcaaaataaaagcatgcttaccttgctttagtatattatagcttacacttttttctggaaagacataaaaatcaggaataagttgtgcaagtctatcatcatcaacttgatccataatctcaaacttattaactttctttgatgttaaatgggctgtgtcatagttttcaatccatgtgtattcaatatttcgccgtattgatttactttctctgttaccttgttgccaggttccactcaacgcaacagttcctgttttattttttttgttatacataaagtcgatggtaagatttgctcgtccctggtcattaaaaattacccaatttgcagtgcatgtttcgttatatatcattttttctgcagtgtaagaatagacagtgaagagaataaacccactgataaaaactaaaataaataataagttttttttataatcaatcacgattaacctcacggtaagacagggttaaacagtttgccacttcatgttggttatagtttttattgcatgccataacaatcatccccggtgaggattttgcaagagggaagtataaccacggatgttttttacagttaatccccgaatccagtatccgtgttttatatttatcgaactctttcaacccatcaattgtatcttctgttacattaaaatggcagccattaatttccgcgactaaaacaatccccatgtcagtacttgcaagatagtcaatccagtcttttccaaggaatagacgtaaaaaacttactgaaaaatcgacaaaaatatatccgcttaatctcgcattgtggttttttgttaagataccttctaccacaccacgattaaaatatgaactttcttcgggccacatacaaaaacacgagtttgcgcaatactgcaaacgcggtgactcttctggcattatttggcaatgcattgagcaactattgcatgtaagacttttataacgactacaaagccccatgttaagaacctccctatccgtatataattgcataatttcattggttattgatgatgtcaatacaccatgattttgtaattttgccgggaaaaattgcgattaatctgtatttgctataattctgagtaaggcatttaaaaatgcatttctcgttatcaaatatgattatgtttcactgatttaatcttgcatggttgagagcggtccagataactatctcatggtataagaatatctatatcgcaaattgtttttgaatgaccagaagatatcttgcgaatctaagttatgcatcttaaatagtcttatttaagatgttcagatctctttatgtgtttaactaactgataatactaggatatgacgagagaagtgatagggtggaataataacaaatgaatattatgaaaaatggaatggttcaaaattgtagcaattttgaaccatccacaactgatattagctaaagaacattaccgatacgcacaggatacccacgatcagcgtaatcagatttccgatggaacgccagggtttaagcgccgggatgagatacgttgacagcgtaggcatgatgaaaagtatcatggcaatgagcgggccgctgatcgcgtaaatcatcgaaatcgcgttcgggttaatgcaacaaacaatgaaggtaatcagcgataccaacataattgatagtgcgcggttaaatgcacgacttttctttacaccaacctgctgtagtgttgttttgacgacctctgtggcaccttcaataacgccaaagtacgtacccaggaatgatttcgacatcgcaactactgcgacaataatcccggaaattgacaaccatgctggggcgttcggcagcatagaaagcgccgataaaatggtgaccccttcttctttagcagcttcaatatacgaaggtggaatagaaagcaggcagctaaagacaaagaacagtacacttatgcagatgatgagataagcgactttcataatttttttgcatttatccatagcgtgttcgccatatttttcacgtctgtctatggcaaacgtagaaataatgggcgtatggctaaaggcgaaaaccatcacgggaatcgatatccatatctggtgaagggtattctgattgaactctacctgggttgttaatagatcaggttgccaactaccgacaaggtaaatggaaagaaataagaaataggcaatcaatgggaataccaaaaatcccattacccgaatagtggcatgacgtcccatcagaaaaatgagattcagaattaatacaacacccagactcaccaacatacggatgcgaagatcaataaccatatgctttgccagctgttccgtaagtgagttggtaattgccactgcatatatcaacacgacgacaaaaaaggcgatgaagtacagcgtggtaatcagattaccaatcttcttgccatagtagtgtgttaccgcgcccgttatcccttcacctgctgatgtttttgatgagaggatgaactggcacaaggctttatgtggccaatatgttaaaggccaggcgaccagagcagtaataaacaggaccacagcccctgccgaacctaactgaataggaaggaagagcgtgcctgcaccaacggctgtgccgtagagcgcgaaactccacagagtttcttctttagaccaaatattagacattatctgaacgtatcatctacaaattaaacaaaatggagggcaatttaccataaaccaggttaagtatgggagattaacgccctatctacccctctattggtgggttagtggttgcaaaccttacgtgccagttatgtctctgactgctgctcaggcatatttcctttgtgataaaaatcactttttttaaacaattaagataactgtaattaacaatcatttactattgcactgttaattggtgcgaggttgtgatgaaagacgttgtgattgtcggggcgttacggacacctatcggctgctttcgtggtgcgttagcgggtcattccgccgtggaacttggtagtctggtcgtgaaagcgttaatagaacgtaccggcgttcctgcatatgcggtggatgaagtaattcttggtcaggtgttgactgcaggggcagggcagaatccggcaaggcaatcggctattaaaggtggtctgcctaatagcgtttctgcaatcactattaatgacgtttgcggttccgggcttaaagcactgcatctggctactcaggcgatacagtgtggcgaggctgatattgtcatcgccggtggccaggaaaacatgagccgcgcaccacatgttctgactgatagccgcaccggtgcacagcttggcaatagccagttggttgacagtcttgtgcatgatgggttgtgggatgccttcaatgattatcatattggtgtcaccgccgaaaatctggctcgcgaatatggcatcagccgtcagttgcaggatgcttacgcacttagctcgcaacaaaaagcgcgagcggcgattgacgccggacgatttaaagatgagatcgtcccggtaatgacccaaagtaacgggcagacgttggttgttgataccgatgaacagccacgcactgacgccagcgcagaaggcttagcccgtttaaatccttcatttgatagtctcggttctgtgacagcgggtaatgcatcatccataaacgatggcgcagctgcggtaatgatgatgagcgaagccaaagcacgagcgttgaatttacccgtgctggcccgcattcgcgcatttgccagcgttggtgtagatccggcattgatgggaattgcgccggtgtatgcgacccgccgttgcctggagcgtgtaggctggcagttggctgaagtcgatcttatcgaggctaatgaagcgtttgctgcacaggcgctttcggttggcaagatgcttgagtgggatgagcgtcgggtcaatgtcaatggtggcgcgatcgcactcggtcacccgataggcgcttccggttgccgaatcctggtttctctggttcatgaaatggtgaaacgtaatgcccgcaaaggactggcaacgctttgtatcggcgggggccagggtgtggcattgaccattgaacgtgacgaatagctctgcatttcctccttaccgataaatatctgccgtcattaatctgttgaataatgatggctggcaagtcgacatacattttctgggctccctcatttttccattctcatgacatattcgtgatcgacactgcactttttttaatccttaacttaaaaatgaaacattgttttatttttaattgaaaaccctagcccatgggcatatcatccctttatagagaaaacgaaacagtgtttcactatcgttttctattttcacgcttcactgattatcggaggttgatgtggacgtaagacagagcatccacagtgcgcacgcaaaaacgctggatacccaagggctgcgcaatgaatttttggttgaaaaggtatttgtcgccgatgagtacaccatggtttacagccacattgaccgaattattgttggcggcattatgccgataactaaaacggtttccgttggcggggaagttggtaaacaactcggcgtaagctatttccttgaacgtcgcgagttaggtgttatcaatattggcggtgccggtacgattactgtcgatggccaatgctatgaaatcggtcaccgcgacgccctgtatgttggtaaaggtgcaaaagaagttgtctttgccagtattgataccggcactccggcgaagttttattacaattgcgcacccgcgcatacgacgtatcccaccaaaaaagtcacaccggacgaagtatctccagtcacgttaggcgataacctcaccagtaaccgtcgcacgattaacaaatattttgtcccggatgtactggaaacctgccaattgagtatggggctgacggagctggctccgggtaacttgtggaacaccatgccgtgtcacacccacgagcgccggatggaagtttatttctatttcaatatggatgatgacgcctgcgttttccacatgatggggcagccgcaagaaacgcgtcatattgtgatgcataacgagcaggcggtgatctccccgagctggtcgatccattccggtgtcggaaccaaagcttatacctttatctggggcatggtcggtgaaaaccaggtctttgatgatatggaccatgtggccgttaaagatttgcgctagttgtgggcataaacgaataaggtattgttatgattttaagtgcattttctctcgaaggtaaagttgcggtcgtcactggttgtgatactggactgggtcaggggatggcgttggggctggcgcaagcgggctgtgacattgttggcattaacatcgttgaaccgactgaaaccatcgagcaggtcacagcgctggggcgtcgttttttaagcctgaccgccgatctgcgaaagattgatggtattccagcactgctggatcgcgcggtagcggagtttggtcatattgatatcctggtgaataacgccggattgattcgccgcgaagatgctctcgagttcagcgaaaaggactgggacgatgtcatgaacctgaatatcaagagcgtattcttcatgtctcaggcagcggcgaaacactttatcgcgcaaggcaatggcggcaagattatcaatatcgcgtcaatgctctccttccagggcgggatccgtgtgccttcttataccgcatcaaaaagcggcgtgatgggtgtgacgcgattgatggcgaacgaatgggctaaacacaacattaatgttaatgcgatagccccgggttacatggcgaccaacaatactcaacaactacgggcagatgaacaacgtagcgcggaaattctcgaccgcattccagctggtcgttggggactgccgagtgacctgatggggccgatagtgttccttgcctccagcgcttcagattatgtgaatggttataccattgccgtggatggcggttggctggcgcgttaattcattcttcttacttttatgaccctgccgcatggcagggttttttatacctgtagatcatcataatccatatcatggttatgaaataatccatattaattatcaattaatgaactttatgaattttatctgctgtaaaattaggtggttaataataatctcaataattcaacttaatttgaaaattggaatatccatcacataacgacatgtcgcagcaatttaatccatatttatgctgtttccgacctgacacctgcgtgagttgttcacgtattttttcactatgtcttactctctgctggcaggaaaaaatggttactatcaatacggaatctgctttaacgccacgttctttgcgggatacgcggcgtatgaatatgtttgtttcggtagctgctgcggtcgcaggattgttatttggtcttgatatcggcgtaatcgccggagcgttgccgttcattaccgatcactttgtgctgaccagtcgtttgcaggaatgggtggttagtagcatgatgctcggtgcagcaattggtgcgctgtttaatggttggctgtcgttccgcctggggcgtaaatacagcctgatggcgggggccatcctgtttgtactcggttctatagggtccgcttttgcgaccagcgtagagatgttaatcgccgctcgtgtggtgctgggcattgctgtcgggatcgcgtcttacaccgctcctctgtatctttctgaaatggcaagtgaaaacgttcgcggtaagatgatcagtatgtaccagttgatggtcacactcggcatcgtgctggcgtttttatccgatacagcgttcagttatagcggtaactggcgcgcaatgttgggggttcttgctttaccagcagttctgctgattattctggtagtcttcctgccaaatagcccgcgctggctggcggaaaaggggcgtcatattgaggcggaagaagtattgcgtatgctgcgcgatacgtcggaaaaagcgcgagaagaactcaacgaaattcgtgaaagcctgaagttaaaacagggcggttgggcactgtttaagatcaaccgtaacgtccgtcgtgctgtgtttctcggtatgttgttgcaggcgatgcagcagtttaccggtatgaacatcatcatgtactacgcgccgcgtatcttcaaaatggcgggctttacgaccacagaacaacagatgattgcgactctggtcgtagggctgacctttatgttcgccacctttattgcggtgtttacggtagataaagcagggcgtaaaccggctctgaaaattggtttcagcgtgatggcgttaggcactctggtgctgggctattgcctgatccagtttgataacggtacggcttccagtggcttgtcctggctctctgttggcatgacgatgatgtgtattgccggttatgcgatgagcgccgcgccagtggtgtggatcctgtgctctgaaattcagccgctgaaatgccgcgatttcggtattacctgttcgaccaccacgaactgggtgtcgaatatgattatcggcgcgaccttcctgacactgcttgatagcattggcgctgccggtacgttctggctctacactgcgctgaacattgcgtttgtgggcattactttctggctcattccggaaaccaaaaatgtcacgctggaacatatcgaacgcaaactgatggcaggcgagaagttgagaaatatcggcgtctgatttcacgggccggatgtgctgtacatccggcccttttttcgttaatagagattgggcacttggccgttgaggcgtttgtctcgttccttattcagccttgttgcggtaacacacatcaggagagaggaatgaaaacaattggtttgctgggaggaatgagctgggaatccaccattccttactatcgtttgataaatgaaggcattaaacagcggcttggtgggcttcactctgcgcaagtgctgctacatagcgtcgattttcatgaaatagaagagtgccagcgtcgcggggaatgggataaaaccggggacattctggctgaggcggcgcttggcttacagcgggcgggcgcagaaggtattgtgttatgtaccaatacgatgcataaagtggcggatgccattgagtcacgttgcactctgcctttcttacacattgcggatgccaccggacgtgcaattaccggggccggaatgactcgtgtggcgctgctgggtacgcgttacaccatggaacaggatttttatcgcgggcggctgacggaacaattttccatcaattgtcttattcctgaagcggatgaacgggcgaaaattaatcagattatttttgaagaactgtgtctggggcaatttaccgaagcgtcacgcgcttattatgcgcaagtgattgctcgccttgcagaacagggcgcacagggcgtcatttttggctgcacagaaattggtttactggtgccagaagagcgcagtgttttgcctgtgtttgataccgcggcgatccatgccgaggatgctgtcgcttttatgctgtcgtagctgacgacaaaatagcgtcaagagaagtgaccagtttcggtaaccccgcttgtaaatgcccactaaacgcctgaaccagcgctgatgacgggcggtgcagggggcggatcaggctgacggtgaacggaaccgcaatactgaaccgccgcaccactaaaccgcttgccgcataatctagtgcggtgagcgggttaaccaccgaaacacctacccccgcccgtaccattgcgcagactgacgcggcgctgtgggtttctacgatcatgcgtcgtttaacctgatgttcagtaaatagctgatccagcaactggcgatagctgtcagtacgggaaaggctgatgtagttctcaccctgaaaatcatccggcgttaataccttttttaccgccagcggatgacccggaggtaacacacacacttcatctaaagagagtaattcggtacgttctgttcccgcaggcgtatggagcgtttcagtgagtcctaaatcatgacgctgggccgagagccactcttcaagtagcggtgattcctggggcacgatatttaagctgacatcgggataacgtgccagaaagggttgcaggagctgcggtaaaaaagattgcgaaaagaccggcaggcaggcaatagacagttctccctggcgaaactcgcgcagactttctgcggcgctgacaatgcgatccagtccgtaccaggatcgttgcacttcttcaaacagacgcagtccttgcacggtaggatgtaatcgcccacgtacgcgctcaaacaatttcagcccgatcaccttctcaaagcgcgcaagttcgcggctgacggttggctgtgaggtgtgtagcaggtgtgccgcctcagtcaggcttccggcggtcattaccgcatgaaaaatttcaatatgacgtaagttaacggcggccattagcgctctctcgcaatccggtaatccatatcatttttgcatagactcgacataaatcgatattttttattctttttatgatgtggcgtaatcataaaaaagcacttatctggagtttgttatgccacattcactgttcagcaccgataccgatctcaccgccgaaaatctgctgcgtttgcccgctgaatttggctgcccggtgtgggtctacgatgcgcaaattattcgtcggcagattgcagcgctgaaacagtttgatgtggtgcgctttgcacagaaagcctgttccaatattcatattttgcgcttaatgcgtgagcagggcgtgaaagtggattccgtctcgttaggcgaaatagagcgtgcgttggcggcgggttacaatccgcaaacgcaccccgatgatattgtttttacggcagatgttatcgatcaggcgacgcttgaacgcgtcagtgaattgcaaattccggtgaatgcgggttctgttgatatgctcgaccaactgggccaggtttcgccagggcatcgggtatggctgcgcgttaatccggggtttggtcacggacatagccaaaaaaccaataccggtggcgaaaacagcaagcacggtatctggtacaccgatctgcccgccgcactggacgtgatacaacgtcatcatctgcagctggtcggcattcacatgcacattggttctggcgttgattatgcccatctggaacaggtgtgtggtgctatggtgcgtcaggtcatcgaattcggtcaggatttacaggctatttctgcgggcggtgggctttctgttccttatcaacagggtgaagaggcggttgataccgaacattattatggtctgtggaatgccgcgcgtgagcaaatcgcccgccatttgggccaccctgtgaaactggaaattgaaccgggtcgcttcctggtagcgcagtctggcgtattaattactcaggtgcggagcgtcaaacaaatggggagccgccactttgtgctggttgatgccgggttcaacgatctgatgcgcccggcaatgtacggtagttaccaccatatcagtgccctggcagctgatggtcgttctctggaacacgcgccaacggtggaaaccgtcgtcgccggaccgttatgtgaatcgggcgatgtctttacccagcaggaagggggaaatgttgaaacccgcgccttgccggaagtgaaggcaggtgattatctggtactgcatgatacaggggcatatggcgcatcaatgtcatccaactacaatagccgtccgctgttaccagaagttctgtttgataatggtcaggcgcggttgattcgccgtcgccagaccatcgaagaattactggcgctggaattgctttaactgcggttagtcgctggttgcatgatgacttgcctccagcgacggagttgacactgaatgacgacgtaccagcgtcggactaaagacattagtgatttccgggagagggcgattatccgccagcgccaaagccagttcggcagcctgggtcgccatcgtcacgattgggtaacgcacggtggtcaggcgcggacgcacatagcgtgacaccagcacatcatcaaagccaattaacgaaatctcacccggtacatcaataccattatcattgagaacgcccatcgcacccgccgccattgaatcgttataacaggctaccgcagtgaaatttcttcctcgtcccaaaagctcggtcattgcctgttcgccgccgctttcgtctggttcgccaaatgtcaccagccggtcattggccgcaataccactttcagcaagggcatcgtaatacccttgcagacgatcttcggcgtcagaaatagagtggttagagcacagataaccaatgcgggtatgaccttgctgaattaaatgacgcgttgccagccaggcaccgtaacgatcgtccagagcaatacaacggttttcaaagccaggcaggatacggttgatcagcaccataccgggcatttgtttcattaatgaggctaaatcagcatccgggatcattttggcatggacgaccaacgcagcacagcgatggcggatcagttgctcaatggcctgacgctctttttgttcgttgtggtaaccgttgccaatcaataaaaaattaccggtgtgataagccacctgttcgaccgctttcaccattgcaccgaaaaacggatcggaaacatcaccaacgaccagaccgaccgtttcagtggtctgctgcgccagcgcacgggcgttggcgttcgggtgatagctaagagactccattgcactatgcacagccagccgggaagcttcgctggctttgggtgaattattaatgacgcgggaaacggtggcgactgaaacgcctgccagtcgggctacatcctttatggtcgccatgaaaataccttagtgggtaaacgcttacattctttcagtgttacggaaaacgcccgttggttcaagggggggcgtgttttcatcgtgggaatgtgagccaaacgcaaataagtaagacaaaaaaagagattgcaaacctttggttacactttgcgaaacgctgttgcgattgaccgctggtggcgtttggcttcaggttgctaaagtggtgatcccagaggtattgataggtgaagtcaacttcgggttgagcacatgaattacaccagcctgcgcagatgcgcaggttttttttgccggtcatcaatctgtaacagtaaccgacaatttacacacctcgttgcatttcccttcattcctttgcgttttctcgctggcgaagagtcgtcgtgcagaccacaatcaagatcccagaggtattgattggtgagattattcggtacgctcttcgtaccctgtctcttgcaccaacctgcgcggatgcgcaggttttttttcgcacctaatttactgtcgctcgcgttctttatctcgtgtaatctccctccattcgcttttactgaatcagagcaaagggagttggaatgctttttagcttttttcgaaatttgtgccgtgttttgtatcgcgttcgcgttacgggtgacacccaggcactgaagggcgagcgcgttctaattacgcctaatcacgtctcttttattgatggcattttgcttggactgtttttacctgtgcgtccagtgtttgccgtttacacctcaataagccaacagtggtatatgcgttggctgaaatcatttatcgactttgttcctctcgacccgacgcaacctatggctattaaacatctggtacgtctggtggaacagggccgaccagtggtgattttccctgaaggacgcatcaccacgacaggctcgctgatgaaaatctacgatggcgcgggttttgtcgcggcgaagtctggtgcaacggttattcctgtgcgtattgaaggggcggaacttacgcacttcagccgcctgaaaggtctggttaaacgtcgcttgttcccgcaaattactctgcatattttgccaccaacgcaggtggcgatgccggatgcgccgcgtgcccgtgaccgtcgcaaaatcgctggcgaaatgctgcatcaaataatgatggaagcgcgaatggcggtgcgcccgcgtgaaacgctgtacgaatctttactgagtgcaatgtaccgcttcggagccgggaagaaatgtgtcgaagacgtcaactttaccccagactcctatcgcaaattgcttacgaaaacgctgtttgttggacgcatccttgaaaaatacagtgttgaaggcgaacgcatcggcttaatgctgcccaatgcaggcatcagtgcggcagtgatttttggggccatcgcccgtcgccgcatgcccgcaatgatgaactacactgccggggtaaaagggctgaccagtgctattacggcggctgaaatcaaaaccatcttcacttcccgccagtttctcgataaaggcaaactctggcatctgccggagcaacttactcaggtgcgctgggtctatctggaagatttaaaagcagatgtcaccactgccgacaaagtatggatcttcgctcatttgctgatgccgcgtctggcacaggttaaacagcagccggaagaagaggcgctgatcctttttacctccggttctgaaggccatccgaaaggcgtcgtccatagccataaaagcattctggcgaatgtcgagcagattaaaacgattgccgacttcaccaccaacgatcgctttatgtcggcgttaccgctgtttcactcctttgggctgacggtaggcctgtttacgccactgcttacaggtgcagaagtgttcctttatccaagcccgctgcattaccgcattgtgccggagttggtgtatgaccgcagttgcaccgtgttgttcggcacctcgactttcctcggtcactacgcgcgtttcgccaacccgtatgacttctatcgtctacgctatgtggtggcaggcgcagaaaaattacaagaaagtaccaaacagctttggcaggataaatttggcctgcgcatccttgaaggctacggcgtgaccgaatgcgcgcctgtcgtttctatcaacgtaccgatggcggcgaaacccggtacggtagggcgtattctaccaggaatggatgcgcgcctgttgtcggtccctggtatcgaagagggcggacgcctgcaactgaaagggccgaacataatgaacggctatctgcgggtggagaagccaggtgtactggaagtgcccaccgccgagaatgttcgcggcgaaatggagcgcggctggtatgacactggcgatattgtgcgttttgacgagcagggctttgtgcagattcagggccgcgcaaaacgctttgccaaaattgcaggcgaaatggtgtcgctggaaatggtggaacaactggcacttggtgtttcgccagataaagtccatgccactgcgattaagagcgatgccagcaaaggcgaggcactggtgcttttcaccacagataacgaactgacgcgcgataagttgcaacagtatgcccgcgagcacggcgtgccggagcttgctgtaccgcgcgatattcgctatctgaaacagatgccattacttggcagcggcaaacctgactttgtcacgttgaaaagctgggtagacgaagcggaacaacacgatgagtgagtcagtgcacactaacacttcgttgtggtcgaaggggatgaaagcggttatcgtggcgcagtttctctctgcgtttggcgataatgccctactgtttgccactctggcgttactgaaagcgcagttctatccggagtggagccagcccatcctgcaaatggtgtttgtaggtgcttacattctttttgcgccgtttgtcgggcaggtggcggatagcttcgccaaaggccgggtgatgatgtttgccaacggcctgaagctgctgggcgcagccagtatctgctttggtatcaatccgtttctcggctatacgctggtgggtgttggtgctgcagcctattcaccggcgaaatacggtattctcggcgaattaaccacgggtagtaagttagtgaaagctaacggtttaatggaagcttctaccatagcggcgattttgctcggttccgtagccggtggtgtgctggctgactggcatgtcctcgtcgccctggccgcatgcgcactggcctacggtggtgcggtcgttgccaatatctacattcccaaactggcggcggcgcgtccggggcagtcctggaatctcatcaacatgacccgcagtttcctgaatgcctgcacctcgctatggcgcaatggtgaaacgcgtttttcgctggtgggcaccagtttattctggggagcgggtgtcacgctgcgtttcctgttggtgctgtgggtaccggtggcgctgggcattaccgataacgctacgcccacctatctcaacgcgatggtagcgattggtatcgtggttggcgcaggtgcggcagcgaagttagttacgctggaaaccgtgtcacgctgtatgccagccgggattttgattggcgtggtggtactgattttttccctgcaacacgagctgctgccagcctatgccttgttgatgctgattggcgtgatggggggcttttttgtcgttccgctcaatgcgttgctacaggagcggggtaaaaaaagcgtcggggcggggaatgcgattgcagtacaaaaccttggcgaaaacagcgccatgttgttgatgctgggcatttactcgctggcggtaatgataggcatcccggtcgtgcccattggcattggcttcggtgcgctgtttgcgctggcaataacggcgctgtggatctggcagcgccgtcattaatatttaacgccggttttaaccggcgttaatcttatggtgccggataagtataaacctgatgcaccgcttcaatttcagctaatacgtcttcgcttaactccagatgcaaactttcgatgttagttttcagctgatccatcgtggttgcgcccagcagagtgctggcaacaaacggttgacggcgtacaaacgcgagcgccatctgagcagggtccaggccatgacgtctggcgatatcaacatacgccgcgacggctttttgcgtttgctcaccgctatagcgggtgaaccgactaaagagcgtattacgtgcgccagcgggttttgcaccattgagatatttcccggtcagcgtgccgaaacccaggcacgaataggccagcagttcgaccccttcatactggctgacttctgccagacctacttcaaaactgcggtttaacagactgtaagggttctgaatggtgacaatacgcggcagatcgtgtttgtccgccagatgcaggtagcgcattacgccaaatgcagtttcgttcgacacgccgatataacgaatttttcccgcgcgttggtactctgccagtgcgtccagcgtatccagcagcgaaaccgcaggcgcagaatccgtccagctataaccgagtttgccgaagcagttggtcgggcgctgcggccagtgcacctgataaagatcgaggtaatcagtctgtaggcgcttgaggctgtcatgcagcgcttcgcggatattcttccgatccagcgcctgatccgggcggatgcccttgtcattattgcgcgacggtccgctcactttggaggcgataattaacttttcgcggctgccatgtttcgccagccagttgccgacgtaggtttcggttaacccttgcgtttcggggcgcggaggtactgggtacatttcggcaacgtcgataaggttaatgccctgagcgacggcatagtcgagttgtgcgtgggcgtcggcttcgctgttctgttcaccaaacgtcatcgtgccaagccccagcgtgctgacttccagcgaactgtggggtatacggtgatattgcatagccgtttcctttttataatcacgacataaggaatataaaaatggcagagggaagggaaaagggaaagagaaaaatcttaaggccagccggatgctgaccttatttgttaacgttcaataatttgcgaaacatcatcacggttaatttgcatcgcgttaccttgctgatcgtgataactcaccagcccggtatcatcatcaatttcaggttttccatcggtcaaaatcatacggccatctttggtcgccatgacgtaatcactggaacacccggaaacagcaaacgccagtccgactgcagaaattattactgcccattttttcatccggttatcctcatttggcctacctatgataatagtctgtttataaaccgacgttatatatcttgaaagcaggaaaatcttaaactgtgagggtaaaaggagtgagtacgccctcccgcaggagagcgtacggagtatcagagcggattctttttgttgcgaatcaagttgaggctttcaaccgcaatagagaagaacatcgcgaagtagatgtaacctttcggtacgtggatgtcgaaactttccagaatcagggtaaagcccaccagaatcaggaaagagagcgccagcatttttaccgaaggatggcgttcgacaaaatcaccaatcgagcgcgcggcgaacatcatcacgcctacggcaatcaccacggctgccatcataataaacaggtgatctgacagacccacagccgtaatcaccgagtcgaggctaaagataatatccagcagcataatctgcacgatagcgccgaggaatgatgaaacgcgtgttttcagcccttcttcttcaccttcaatggattcgtggatttccttgctggctttccagataaggaacaagccacccagaagcagaatcaaatcacgggcagaaatttcctgactgaatattgtaaaaagcggatttgtcaggcgcgtaacccaggcgattgatgccagcagcgccagacgcataaccatggctcccgccaaccccagacggcgcgcatgagcacgttgtgctgtgggaagctttgccaccaccagagaaaggaaaataatattgtcgatcccaagaacgatctccagcagcgtcagcgtaccgagcgcaagccaggcgttaggatcggttatccatgcaaataacatctaaaaagccctgccaaaaaaatgaagcggtaattatatgcccggaaagcggcaggtcaaagcgatggctactggatcagaaaatgacgggccagtagtgcactggtgaaattcttcttcaaataaaagccgcgtggcagcgtcagaatccgttcgccccgggcaccaatggcttcggtaagcgctttcgcattcgctgctttcggtcgtatctgtaaatactccccgtgacgagcggtaatccgctcaacctgaccgagaacaatcatatccattaattcttcccagtcttcgcgtagctgccggtcttcctcttcattcgggctccacagcaacggtgatccaacgcgacgctgcgccagcgggatgctgcgctcgccttcaaccggtatccacagtacgcgtttgagtttgtggcgcacgtggctggtttcccaggtcaccccgctattgcccgttaacggggcaacacaaacgaatgttgtttccagcggacgaccaagactatccacagggatagttttaagttccacgcccagagcagcaaaatcttgctcaggtttactccctgcgctggcacctagccagatctccagtaacacgccaatccagcctttatcgcgttttaaattctctggcgtaaccagcccgacaagtgccgccagttctcccaatgtataaccagaaagttgctgtgcttgcgctaacaactgttcttcagtttcgggaggagagagcagtgggcgaggttgggacatgtcatgataccttgattaaaaaacaaacagcaattatgtgccgaatattcgcagtgtaactttttccacatgcgttgttcaattctctgatttatattgctttttaggttgccggtaatcgagttgcgcaacactgcaacgggttttccaaatctggtcactgaaaataaacaggatcttacaccatgttatccacagaaagctgggataactgtgaaaaacctccactactgtttccatttacagccttgacgtgcgacgaaactccagtttttagtggttcagtgcttaacttagtggcacattctgtggataaatacggcattggttgatctttcgccaacccgtaaatgagaggtgtgacctgggtcacgaattactctttttcattactaaaattacatgtaatgcattgactgataatgaatattttaaaatgtctatatcgggcttattcagaatgctccgggttttcccgtagtaattccgtagttcttcacaactctatccacagaaaaggtgaataaaaacggctatccaccccttcctctgtttataactctgcacataactgtgagttattcaattgttattagtgtgtaatgccctgcagagagtggtttaccgtcttcctggagtatgaaacaatcattcgtatataaagctttattttgaggtagtccggtgattgatgacgatggctaccgcccaaacgtaggtatcgtgatttgtaatcgccaggggcaggtaatgtgggcccggcgatttggtcagcactcctggcaatttccgcaaggcggaatcaaccccggagaatccgcagagcaggcgatgtaccgtgaattgtttgaagaagtaggattaagccgcaaagacgttcgaatccttgcttcaacgcgtaactggttgcgctacaaattaccgaaacgtttggtgcgttgggacacgaagccggtttgtatcggccaaaaacaaaaatggtttctcttgcagctggtgagcggcgatgcagaaatcaatatgcaaaccagcagtacaccagagtttgacggctggcgatgggtaagttactggtatccggtcagacaggtggtgtcatttaaacgtgatgtctaccgtagggtaatgaaagagttcgcgagtgtggtgatgtcactgcaggaaaatacgccaaaaccacaaaacgcatctgcttatcgacgtaaaagaggttaagtcacgccaattatgctcactcgcctgcgcgaaatagtcgaaaaggtagccagcgcaccacgcctgaatgaggcgttaaatattctggttaccgacatctgtcttgcgatggataccgaggtctgttcggtctacctggccgatcatgatcgacgttgttactacctgatggcgacccgggggctgaaaaaaccacgcggtcgcactgtaacgctcgcgtttgatgaagggatcgtcggcctggttggcaggctggcggaaccgataaaccttgcagatgcgcaaaagcaccccagcttcaaatacatcccctccgtaaaagaagaacgtttccgcgcgtttttaggcgtaccaattattcaacgtcgccagttgcttggtgtactggtggtacagcaacgagagttgcgccagtatgacgaaagtgaagaatccttcctggtgacgcttgccacccagatggcagctattctttctcagtcgcagttgactgccttgtttgggcaatatcgccagacgcgaatccgcgcattaccggcagcacctggtgtggcgattgccgaaggctggcaggatgccacgttacctttaatggaacaggtgtatcaggcatcaacgctggatccggctctggaacgcgaacgactgaccggggcgctggaagaagcggcaaacgagtttcgccgctacagcaaacgctttgccgccggtgcacaaaaagaaacggcggctattttcgatctttactcgcacctgctttcggacacccggctgcgtcgcgaattgtttgccgaggttgataaaggctcggtggcagagtgggcggtaaaaacggtcattgaaaaatttgccgaacagtttgccgcgctaagtgataactatctcaaagagcgggctggcgatttacgtgcgctgggtcagcgattgctgtttcatcttgatgacgctaatcaagggccgaacgcctggccggaacgtttcattctggtggcagatgaactgtcagcgacaacgcttgctgagctgccccaggatcgcttagtcggtgttgtcgtgcgagatggcgcagccaactcccatgctgcgatcatggtacgtgcgctggggatccctaccgtgatgggcgcggatattcagccttcggtgctgcatcgtaggacgctgatcgttgatggctatcgcggtgaattgctggtcgatccggagccggtactgctgcaagaatatcagcggctaattagtgaagagattgagcttagccgtctggcggaagatgacgtcaatttacccgcgcagttaaaaagcggtgagcgtataaaagtcatgctcaatgctggtttaagcccggaacatgaagaaaaactgggcagccgtattgatggcatcggtctttatcgcactgaaatcccattcatgctgcaaagtggtttcccgtcggaagaagaacaggtggcgcagtatcaggggatgctgcaaatgttcaatgataaacccgtcaccttgcgtacgctggatgtcggagcagataagcagctgccttacatgccgatcagcgaagagaatccatgcctgggttggcgtgggattcgcattacgctcgatcagccggagatcttcttgatccaggtgcgggcgatgctgcgtgctaatgccgctacgggcaacctgaatattctgttgccgatggtcacaagcctcgatgaagttgatgaagcacgccgcctgattgaacgtgccggacgtgaagtcgaggagatgatcggttacgaaattcccaaaccacgtatcggcatcatgctggaagtgccgtcaatggtatttatgctgccgcatctggcaaagcgggtcgatttcatctctgttggcaccaacgatctgactcaatacattctggccgttgatcgcaacaatacccgggtggcgaacatttatgacagtcttcatcctgcaatgttacgagctctggcgatgatcgcccgggaagcggaaatacatggaatcgatctccgtttgtgcggtgaaatggcgggcgatcccatgtgcgtggcaatcctcattgggcttgggtatcgccatctgtctatgaacggacgttctgtagcgcgggcaaaatacctgctgcggcgcattgattatgccgaagcagaaaatcttgcgcagcgtagtctggaagcgcaactggcgaccgaagttcgccatcaggttgcagcctttatggagcgtcgcggcatgggcgggctgattcgcggagggttatagcgcggatcatatacatatcttttaacggtatccggcaaccagccaggtccccttgtgctattattcgcacctttggagcgcctgaaacctgcggcgcgcatttcaatcgctgttctctttcagcgaaataacaagaacttgtggtgacagatgaccagtagctatctgcattttccggagtttgatccggtcattttctcaataggacccgtggcgcttcactggtacggcctgatgtatctggtgggtttcatttttgcaatgtggctggcaacacgacgggcgaatcgtccgggcagcggctggaccaaaaatgaagttgaaaacttactctatgcgggcttcctcggcgtcttcctcgggggacgtattggttatgttctgttctacaatttcccgcagtttatggccgatccgctgtatctgttccgtgtctgggacggcggcatgtctttccacggcggcctgattggcgttatcgtggtgatgattatcttcgcccgccgtactaaacgttccttcttccaggtctctgattttatcgcaccactcattccgtttggtcttggtgccgggcgtctgggcaactttattaacggtgaattgtggggccgcgttgacccgaacttcccgtttgccatgctgttccctggctcccgtacagaagatattttgctgctgcaaaccaacccgcagtggcaatccattttcgacacttacggtgtgctgccgcgccacccatcacagctttacgagctgctgctggaaggtgtggtgctgtttattatcctcaacctgtatattcgtaaaccacgcccaatgggagctgtctcaggtttgttcctgattggttacggcgcgtttcgcatcattgttgagtttttccgccagcccgacgcgcagtttaccggtgcctgggtgcagtacatcagcatggggcaaattctttccatcccgatgattgtcgcgggtgtgatcatgatggtctgggcatatcgtcgcagcccacagcaacacgtttcctgaggaaccatgaaacagtatttagaactgatgcaaaaagtgctcgacgaaggcacacagaaaaacgaccgtaccggaaccggaacgctttccatttttggtcatcagatgcgttttaacctgcaagatggattcccgctggtgacaactaaacgttgccacctgcgttccatcatccatgaactgctgtggtttctgcagggcgacactaacattgcttatctacacgaaaacaatgtcaccatctgggacgaatgggccgatgaaaacggcgacctcgggccagtgtatggtaaacagtggcgcgcctggccaacgccagatggtcgtcatattgaccagatcactacggtactgaaccagctgaaaaacgacccggattcgcgccgcattattgtttcagcgtggaacgtaggcgaactggataaaatggcgctggcaccgtgccatgcattcttccagttctatgtggcagacggcaaactctcttgccagctttatcagcgctcctgtgacgtcttcctcggcctgccgttcaacattgccagctacgcgttattggtgcatatgatggcgcagcagtgcgatctggaagtgggtgattttgtctggaccggtggcgacacgcatctgtacagcaaccatatggatcaaactcatctgcaattaagccgcgaaccgcgtccgctgccgaagttgattatcaaacgtaaacccgaatccatcttcgactaccgtttcgaagactttgagattgaaggctacgatccgcatccgggcattaaagcgccggtggctatctaattacgaaacatcctgccagagccgacgccagtgtgcgtcggtttttttaccctccgttaaattcttcgagacgccttcccgaaattttgcaacgtcctgcaacggcgtaaatagtccggaagatgcgccgaagaaatagaaactggccctcgtctttttttctcctcgctccatactgccggcatgaaaacacaacgtggttatacgctgattgaaacgctggtcgcgatgctgattttggtcatgctaagcgcaagtggactctatggctggcaatactggcagcagtcgcaacggctatggcaaaccgccagccaggcgcgggactatttgctctatttacgtgaagatgccaactggcataaccgcgaccacagtatcagcgttatcagggaggggacgttatggtgccttgtgagttccgctgctggggccaatacctgtcatggcagttcaccattggtctttgtgccacgctggcccgaagtcgaaatgagcgacctgacaccttcgcttgctttctttggcctgcgcaataccgcatgggccgggcatattcgcttcaaaaactcaacgggcgagtggtggctggtggtttcgccgtggggaagactccggctttgtcagcaaggagaaacagaaggatgcctgtaaaagagcaaggtttttctctgctggaagtgttgattgctatggcgatcagtagcgtattgttgctgggggcggcacgctttctgcctgcgttacagcgtgaaagtttaacgagcacccgtaagctggcgctggaagatgaaatctggctgcgggtatttaccgtcgcgaagcatctccagagggcgggttattgtcatggcatctgtaccggcgaagggctggaaattgtcggacagggtgactgtgtcattgtgcagtgggatgcgaacagtaacggtatctgggatcgcgaaccggtaaaagagtccgaccagattggatttcgtctgaaggagcatgtgctggaaacgctacgcggtgcgacatcctgtgaaggtaagggctgggataaagtcactaatccggatgccatcattatcgacacttttcaggtcgtacgtcaggatgtcagcggcttctcgccggtgttgacggttaatatgcgtgctgccagtaagtctgaaccgcaaaccgtggtgaatgccagctatagcgtgacaggattcaacctgtgaaccgcgaaaagggtgtttcgtcactggctctggtcctgatgctgctggttttgggtagtttgctattacaaggaatgagccaacaggatcgcagttttgcctctcgcgtgagcatggaaagtcagtcattgcgccgccaggccatcgttcagtcggcgctggcgtggggaaaaatgcactcctggcagacgcagccagcagttcagtgctcgcagtacgctgaaaccgatgcccaggtttgtttgcgtttactggcagataatgaagccttattgattgccggttatgaaggcgtttcgttgtggcgaacaggcgaagtcattgatggaaacattgttttttcgccacgcggctggagcgatttttgtccgctgaaagagagggcgttatgtcagcttccctgaagaatcaacaaggctttagcctgccggaggtaatgttggcgatggtgttgatggtgatgattgtcactgcgttatcgggtttccagcgaacattaatgaacagtcttgccagcagaaaccagtaccaacagctctggcggcatggctggcagcaaacgcaactgcgcgcgatttcgccacctgccaactggcaggtcaaccgaatgcagacatcgcaggcgggatgtgtcagcatcagcgttacgctagtttcacccgggggcagagaaggcgagatgacccgcctgcattgcccgaatcgtcagtagtcaggagccgctatgttaagggtctaccattccaatcgtctggacgtgctggaagcgttgatggagtttattgtcgaacgcgaacggctggacgatcctttcgaaccagagatgattctggtgcaaagtaccggtatggcacagtggctgcaaatgaccctgtcgcaaaagtttggtattgcggcaaacattgattttccgctgccagcgagctttatctgggatatgttcgtccgggtgttaccggaaatccccaaagagagcgcctttaacaaacagagcatgagctggaaactgatgactctgctgccgcaattgctggagcgcgaagactttaccctgttgcggcattatctgactgacgatagcgacaagcgaaaactgttccagctttcctcaaaagcggcggacctgtttgaccagtatctggtctatcgtccggactggctggcacagtgggaaacaggacatttggttgaagggctgggagaagcacaggcctggcaagccccgttgtggaaggcgctggtggaatatacccatcaactcgggcaaccgcgctggcaccgcgccaatctctatcagcgctttatcgaaacgctggagtccgcgacgacctgcccgccggggttaccttcgcgcgtctttatatgcggtatttccgcgttaccgcctgtttatctccaggcgctacaggcgctgggtaaacatattgaaatccatctcctgtttaccaacccctgccgttattactggggcgatattaaagatcctgcttatctggcgaaactgctgacccgtcagcgtcgacacagttttgaagatcgcgaattgccgctatttcgtgatagcgaaaatgccgggcagctctttaacagcgatggtgaacaggatgtcggcaacccgctgctggcttcatggggtaagcttgggcgcgactacatttatctcctttctgacctggagagcagccaggagctggacgcctttgtcgatgtcacgccagataacctgctgcataacattcagtctgacattctggaactggaaaaccgcgccgttgctggtgtgaacatcgaagagttttcccgtagcgataacaaacgcccgcttgatccactggatagcagtatcaccttccacgtttgccatagcccgcagcgtgaagttgaagttttacacgatcgcctgctggcgatgctggaggaagacccgacacttactccgcgcgacatcatcgtgatggtggctgatatcgacagctacagtccgtttattcaggctgtgtttggtagcgcacctgcggatcgttacctaccttacgccatttccgaccgtcgtgcgcggcagtcacatccggtactggaagcgtttatcagcctgttatcactgcctgacagtcgttttgtgtcagaggatgtgctggcgttgctggatgtgccggtgctggcggcgcggtttgacatcaccgaagaagggctgcgttatttacgccagtgggtcaacgaatccggcattcgttggggcatagatgacgacaacgttcgcgagctggaactccccgccaccggacaacacacctggcgatttggcctgacgcgtatgttgttgggctacgcgatggagagcgcgcagggcgagtggcaatcggttctaccttatgatgaatcgagcggcttaattgcagaactggtggggcatctggcttcactgctaatgcagctaaacatctggcgtcgcgggctggcacaggagcgtccgctggaagagtggttgccggtttgtcgcgatatgctcaacgccttcttcctgccggatgcggaaaccgaagcggcgatgacgctgatcgaacaacaatggcaggcgattatcgccgaaggtttaggtgcgcagtatggcgacgcggtgccgctgtcactattgcgtgatgaactggcacagcgtctggatcaagaacgtatcagccagcgttttctcgccggaccggttaacatttgtactctgatgccaatgcgttcaattccgttcaaagtggtttgcctgctgggaatgaacgacggcgtttatccacgtcagcttgcgccattgggctttgacctgatgagccagaaaccgaagcgtggcgaccgtagccgtcgcgatgacgaccgctatctgttcctggaagcgttaatttccgcgcagcaaaaactctatatcagctatatcggtcgttccattcaggataacagtgagcgtttcccgtcggtactggtgcaggaactgatcgactacatcgggcaaagtcattatctaccgggcgatgaagcgctcaactgtgatgaaagcgaggcaagggtaaaagcgcatcttacttgcctccatacccggatgccgtttgatccacaaaactaccagccaggcgaacgacaaagctatgctcgtgaatggctacctgcggccagccaggctggtaaagcacattctgaatttgttcagccgctgccgtttaccttaccggaaaccgtgccgctggaaacgctacaacgattctgggcacatccggtgcgggcatttttccagatgcgtttgcaggtgaacttccgtactgaagacagcgaaatccccgacaccgagccatttattctggaaggacttagccgttatcaaatcaatcagcagttattgaatgcactggttgagcaggatgatgccgaacgcttgttccgccgcttccgagcggcaggggatttaccgtatggcgcttttggtgaaattttctgggaaacacagtgccaggagatgcagcagcttgccgacagagtcattgcctgtcgccagccggggcagagtatggaaattgatctcgcctgcaacggtgtgcagataactggctggttgccgcaggtgcagccggatggcctgttgcgctggcgtccctctttattaagtgtggcccagggaatgcaactttggctggaacaccttgtctactgtgccagcggtggtaatggtgaaagtcgcctttttctacgcaaagacggcgagtggcgttttccgccgcttgcagccgaacaggctttgcattacctctcacaactgattgaggggtatcgtgaaggaatgtccgcgccattgctggtgttacctgaaagtggcggcgcgtggctaaaaacctgttatgacgcgcaaaacgatgccatgctggatgacgattccacgttgcaaaaagcccgtacgaaattccttcaggcttacgaaggcaacatgatggtgcgtggcgaaggtgatgatatctggtatcaaaggctctggcggcaattaacaccagagacaatggaggccatcgttgaacagtcgcaacgtttcctgttaccgctgtttcgctttaatcagtcatgagtgctgtataaaaattgcgcaatctatccgcttactttatgatgcgcaccagtcacggactgatggttatataaacataggctgactcgtgcagcacaagattaaattctggcagatgatttgcgttaacgtgttgaatctggacagaaaattaagttgattatgaggtccgtgaatgccccgcagcacctggttcaaagcattattgttgttagttgccctttgggcacccttaagtcaggcagaaacgggatggcagccgattcaggaaaccatccgtaaaagtgataaagataaccgccagtatcaggctatacgtctggataacggtatggtggtcttgctggtttctgatccgcaggcagttaaatcgctctcggcgctggtggtgcccgttgggtcgctggaagatcccgaggcgtaccaggggctggcacattaccttgaacatatgagtctgatggggtcgaaaaagtacccgcaggctgacagtctggccgaatatctcaaaatgcacggcggtagtcacaatgccagcactgcgccgtatcgcacggctttctatctggaagttgagaacgacgccttgcctggtgcggtagaccgcctggccgatgctattgctgaacctttgctcgacaagaaatatgccgaacgtgagcgtaatgcggtgaacgctgaattaaccatggcgcgtacgcgtgacgggatgcgcatggcacaggtcagcgcagaaaccattaacccggcacaccccggttcaaagttttctggtggtaacctcgaaactttaagcgacaaacctggtaatccggtgcagcaggcgctgaaagatttccacgagaagtactattccgccaatttgatgaaggcggttatttacagtaataaaccgctgccggagttggcaaaaatggcggcggacacctttggtcgcgtgccgaacaaagagagcaaaaaaccggaaatcaccgtgccggtagtcaccgacgcgcaaaagggcattatcattcattacgtccctgcgctgccgcgtaaagtgttgcgcgttgagtttcgcatcgataacaactcagcgaagttccgtagtaaaaccgatgaattgattacctatctgattggcaatcgcagcccaggtacactttctgactggctgcaaaagcagggattagttgagggcattagcgccaactccgatcctatcgtcaacggcaacagcggcgtattagcgatctctgcgtctttaaccgataaaggcctggctaatcgcgatcaggttgtggcggcaatttttagctatctcaatctgttacgtgaaaaaggcattgataaacaatacttcgatgaactggcgaatgtgctggatatcgacttccgttatccgtcgatcacccgtgatatggattacgtcgaatggctggcagataccatgattcgcgttcctgttgagcatacgctggatgcagtcaatattgccgatcggtacgatgctaaagcagtaaaggaacgtctggcgatgatgacgccgcagaatgcgcgtatctggtatatcagcccgaaagagccgcacaacaaaacggcttactttgtcgatgcgccgtatcaggtcgataaaatcagcgcacaaactttcgccgactggcagaaaaaagccgccgacattgcgctctctttgccagagcttaacccttatattcctgatgatttctcgctgattaagtcagagaagaaatacgaccatccagagctgattgttgatgagtcgaatctgcgcgtggtgtatgcgccaagccgttattttgccagcgagcccaaagctgatgtcagcctgattttgcgtaatccgaaagccatggacagcgcccgcaatcaggtgatgtttgcgctcaatgattatctcgcagggctggcgcttgatcagttaagcaaccaggcgtcggttggtggcataagtttttccaccaacgctaacaacggccttatggttaatgctaatggttacacccagcgtctgccgcagctgttccaggcattgctcgaggggtactttagctataccgctacggaagatcagcttgagcaggcgaagtcctggtataaccagatgatggattccgcagaaaagggtaaagcgtttgagcaggcgattatgcccgcgcagatgctctcgcaagtgccgtacttctcgcgagatgaacggcgtaaaattttgccctccattacgttgaaagaggtgctggcctatcgcgacgccttaaaatcaggggctcgaccagagtttatggttatcggcaacatgaccgaggcccaggcaacaacgctggcacgcgatgtgcaaaaacagttgggcgctgatggttcagagtggtgtcgaaacaaagatgtagtggtcgataaaaaacaatccgtcatctttgaaaaagccggtaacagcaccgactccgcactggcagcggtatttgtaccgactggctacgatgaatacaccagctcagcctatagctctctgttggggcagatcgtacagccgtggttctacaatcagttgcgtaccgaagaacaattgggctatgccgtgtttgcgtttccaatgagcgtggggcgtcagtggggcatgggcttccttttgcaaagcaatgataaacagccttcattcttgtgggagcgttacaaggcgtttttcccaaccgcagaggcaaaattgcgagcgatgaagccagatgagtttgcgcaaatccagcaggcggtaattacccagatgctgcaggcaccgcaaacgctcggcgaagaagcatcgaagttaagtaaagatttcgatcgcggcaatatgcgcttcgattcgcgtgataaaatcgtggcccagataaaactgctgacgccgcaaaaacttgctgatttcttccatcaggcggtggtcgagccgcaaggcatggctattctgtcgcagatttccggcagccagaacgggaaagccgaatatgtacaccctgaaggctggaaagtgtgggagaacgtcagcgcgttgcagcaaacaatgtccctgatgagtgaaaagaatgagtgatgtcgccgagacactagatcctttgcgcttgcccttacagggtgagcgcctgattgaagcctctgccggcacaggcaaaacctttacgattgcggcgctctatttgcgcctgttacttggactaggcggttccgccgcctttccccgcccgctgaccgttgaagaactgctggtggtcacctttaccgaggctgccacggcagaattgcgcggtcgtatccgtagcaatatccacgagttgcgcatcgcctgtctgcgtgaaaccaccgacaatccactgtacgaacgcctgctggaagagatcgacgataaagcgcaagccgcgcagtggttgttgttagccgaacggcagatggatgaagcggcagtctttactattcacggcttttgccagcgcatgctcaacctgaatgcctttgaatccggcatgctgtttgagcagcagctgattgaagatgagtctctgctacgctaccaggcctgcgccgatttctggcgtcgccactgctacccgctgccgcgtgaaatagcccaggtcgtctttgaaacctggaaagggccgcaggcgttgctgcgcgatattaatcgttatctgcaaggcgaagcgccggttatcaaagcaccgccgcccgatgatgaaacgctggcttcccgtcacgcgcaaattgtggcgcgtattgatacggtaaaacagcagtggcgcgacgcagtgggtgaactggatgcgctgatcgaatcttctggtattgatcgacgcaagtttaaccgtagcaatcaggctaaatggatcgacaagatcagcgcctgggcagaagaagagacaaacagttatcagttgccggagtcgctggaaaaattctcccagcgtttcttagaagatcgcacgaaggccgggggggaaaccccgcgacatccactgtttgaggcgatcgatcaactgcttgcagaaccattgtcgatccgcgatctggtgatcacccgcgcattggctgagatccgcgaaacagtagcgcgtgaaaaacgccgccgtggcgaattgggttttgatgacatgttaagtcggctcgattccgcgctgcgtagcgaaagcggtgaggtgttggcagcggcgatccgtacgcgattcccggtggcaatgatcgatgaatttcaggataccgacccccagcagtaccgaatttttcgccgtatctggcaccatcagccggaaaccgcattgttgctaattggcgacccgaagcaggccatatatgcattccggggtgcggatatcttcacttatatgaaggcgcgtagcgaagttcacgcccactacactttagacaccaactggcgttccgcaccaggaatggtgaacagcgtgaataagcttttcagccagactgatgacgcgttcatgtttcgcgaaataccgtttattccagtgaaatcagccgggaaaaatcaggcgttacgttttgtatttaaaggtgaaacacagcctgcgatgaaaatgtggctgatggaaggcgaaagctgcggcgttggcgattatcaaagtaccatggcgcaggtatgtgctgcgcaaatccgcgactggctacaagccggacagcggggcgaagcgttgctgatgaacggcgacgacgcgcgtccggtgcgtgcttcggacatcagtgtgctggtgcgcagccgccaggaggccgcccaggtgcgcgatgccttaacgttgctggaaatcccttccgtttacctttcgaaccgcgacagtgtttttgaaactctggaagcgcaggaaatgctttggttgttgcaggcggtgatgacgcccgaacgtgagaacaccctgcgtagtgcgctggcaacgtcaatgatggggctgaacgcgctggatatcgaaacgctgaacaatgacgaacatgcgtgggatgtggtagtcgaagagttcgatggttatcggcaaatctggcgcaaacgtggcgttatgccgatgctgcgggcgctgatgtcggcgcgtaacattgctgaaaacttgctggcaacggcaggcggtgagcggcgtcttaccgatatcttgcatatcagcgaactgctacaagaagccggaacgcagctggaaagtgaacatgcgctggtacgctggttatcgcaacatatcctcgagccagacagtaatgcctccagccaacaaatgcgtctcgaaagtgataaacatctggtgcagattgtcacgatccacaaatcgaaagggctggaatatccattggtctggctgccgtttatcaccaatttccgcgtccaggagcaggcgttttatcacgatcgccactcgtttgaggcagttctggatcttaatgctgcgccagaaagcgtcgacctcgcggaggccgaacgtctggcggaagatctgcgtttgctttacgtggcgctgacacgttcggtttggcattgcagtctcggcgttgcaccgctggtgcgccgtcgtggcgataaaaaaggtgacaccgacgtccaccaaagtgcgctcgggcgtttgctgcaaaaaggggaaccgcaagatgcggcagggcttcgcacctgtattgaagcgttatgcgatgatgatattgcctggcaaacggcacaaactggtgataaccaaccctggcaggttaatgatgtttctacagcagagctgaatgcgaagacgttacaacgattgcccggcgataactggcgcgtcaccagctactctggtttgcaacagcgtggtcacggtatcgcccaggatttgatgcctcggctggatgtcgatgctgcaggcgttgccagcgtcgttgaagaaccgacgttaacaccacatcagtttccgcgcggtgcgtcaccggggacgttcttgcacagtttgtttgaagacctggattttacccagccggttgacccgaactgggtgcgggaaaaactggaactcggcggctttgaatcgcagtgggaaccggtattgaccgagtggatcacggctgtcctccaggcacctctcaatgaaaccggcgtaagcctgagtcaactttccgcccgcaataaacaggtggagatggagttttatctgccgattagtgaaccgcttatcgccagtcagcttgatacgttaatccgccagtttgacccgctatccgcaggctgcccgccgctggagttcatgcaggtacgtggcatgttaaaaggctttatcgacctggtgttccgccacgaagggcgttattacctgctcgactataaatccaactggttgggtgaagacagttcggcttacacccaacaggctatggcagcggcaatgcaggcacaccgctatgatctgcaatatcagctttataccctggcgctgcatcgttatctgcgccatcgcattgctgattacgactatgagcaccactttggcggcgttatttatctgttcctgcgtggcgttgataaagaacatccgcaacaggggatttacacaacccgacccaacgccgggttgattgccctgatggatgagatgtttgccggtatgaccctggaggaggcgtaatgaaattgcaaaagcaattactggaagctgtggagcacaaacagctacgcccgctggatgtgcaatttgccctgaccgtggcgggagatgaacatcctgccgtcaccctcgcggcggcactgttaagtcatgatgccggagagggacacgtttgtttgccgctttcacgactggaaaataacgaggcgtcgcatccgctgttggcgacctgtgtcagtgaaatcggtgagctacaaaattgggaagaatgcttgctggcttctcaagcggtcagcaggggagatgaacccacgccgatgatcctctgtggcgatcgtctttatttgaatcgcatgtggtgtaacgagcgcacagtggcacgctttttcaacgaagtgaatcatgccattgaggttgatgaagctctactggcgcaaaccctggacaaactttttccagtaagcgatgaaattaactggcaaaaagttgcggcggcagtggcgctgacgcggcggatctcggtgatttccggcggccctggcaccggtaaaacgaccaccgtagcgaagttgctggcagcgttaattcaaatggccgacggcgaacgctgccgtatccgtctggctgcaccaacgggtaaagctgccgcgcgcttaaccgaatctctcggcaaggctttgcgacagttaccgctgaccgatgaacaaaagaaacgcattccggaagatgccagcactttgcaccgattgctgggcgcgcagccgggtagccagcgtttacgtcatcatgccggtaacccgctgcatcttgatgtgctggtggtagatgaagcgtcaatgatcgatctgcctatgatgtcgagactgatcgacgccttgcccgatcatgcgcgagtgatctttctcggcgatcgtgatcaactggcctcggttgaggctggggctgtgctgggcgatatctgcgcttatgccaacgcgggctttaccgccgagcgtgccaggcagctaagccgcctgacggggactcacgttccggcaggaaccggcacagaagcggcatctttgcgcgacagtctctgcctgctgcaaaaaagctatcgtttcggcagcgattctggcattggtcagttagctgcggcgatcaaccgtggtgataaaacggcagtgaaaaccgtttttcagcaggattttactgatatcgaaaaacggcttttacagagcggcgaagattatattgcgatgcttgaggaagctcttgcgggttacggacgttatctggatctgctgcaagcgcgtgccgagccggatttaatcattcaggcgttcaatgagtaccagcttttgtgcgccctgcgggaagggccgtttggcgtggctggactgaatgagcgaattgagcagtttatgcaacagaagcgcaaaattcatcgtcatccgcactctcgttggtacgaaggtcgaccggtgattattgcccgtaatgacagcgcgcttgggttgtttaatggcgatatcggtattgcgctggatcgcgggcaggggacgcgcgtctggtttgcgatgccggacggcaatattaagtctgtgcaaccgagtcgcttgccagagcacgaaactacgtgggcgatgacggtacataaatcgcagggatcggagttcgaccatgcggcgttgattttgccgagccaacgcacgccggtagtaacgcgagagctggtttataccgcggtgacccgcgcgcgtcgccgtctgtcgctgtatgccgatgagcgcatattaagtgcggcaatcgccactcgtactgagcggcgcagtggtctggcggcgttgtttagttcacgggaataaacgtaattgccggatgcgacgtacgagtgttacgcatgtcgcatccgacgattttcatcgcttaccctaaatccgccatcaacactttggatttacgctggtagttgtacaactgctttttgctctcgggcagtaaatcaatatccactggggtaaatccacgttcctggaaccagtgaatactgcgcgtggtcagcacaaacaatttgcttaagccgctctgcttcgcctgagcggcaatgcgttccagcagaacttcaccccttgatgaactgcggtaatccgggtgaactgccacacaggccatttccccaatcttctcttccgggaacggatagagcgcggcgcaggcaatagtcgtgttatcgcgctgaataatggtgaatttgtcgatttccatctccagctgctcgcgagaacggcgtaccagaataccttgctgctccagtgggcgaatcaactccagaataccgccaatatcgttgattgttgcgcgacgaatctgctcggcgctttccatcacaatctgcgtaccgataccgtcgcgtgagaacaactcttgcaacagcgcgccatcttcctgataactgattaaatgacagcgacgcacgccgctgcggcaggctttcactgcgccacgcaaaaagcgcaccgtaccggagttgtaatcgcctttctcttcctgggcttctacccgcgcttgcgcttcgttagggaaaagttcggagacaatatcaccgtcgtcattagtgacgccctgggaagagcaaaaaccaatcatcttttcagctttcagtttgatggccagttgagtggcaatctcttccgaggtcaggttaaagctctcgccagtgactgaaacagcgaccggccccattagcactattgcaccgctgtccagttgacgatggatcgcgtcttcatcaatccgccggatacgcccgctatggcagtaatccacgccgtcatcgacgcccagcggctgggcaataataaaattgccactgacgacgttgatatgcgcgccctgcagcggcgtgttattgagactcatcgacaggcgagcagtaatatccagttgcaatgttcccgcagcctgcttcaccagttccagtgttttggcgtcggtcacacgtatattcttgtgatacagcggttcgtggtgatgcgcagccagatttgcgtcgatctgcggacgtgcgccatagaccaccaccagacggatgccgaggctgtgcaacaacccgatatcattaacgatactggagaaattctcatgctcaatggcttcaccgccgagcatgatgacaaacgtttttccccggtgggtattgatatagggaaccgaatggcggaatccctcgaccaactcggttttacgttcctttaccacggcacacctctttgcatgattattcgaaattagtgtatttttattctgttttttcgcagggtgcaagtgtaaattttatgcgagagcgacttttttatcagtaatgccgtgaatataaaaagaatgtttaccgtttattagatgacagattatgcgtctttcgctaaagtttccggtcaaattagtcgtttacttgttacacagcttagatttcttttgctcgggagaggcatgtcaggatccaacactgcaatcagccgtcgtcgtttactgcaaggcgcgggtgccatgtggctattgagcgtaagtcaggtcagtctggctgcggtcagccaggtcgtggcggtgcgcgtctggcctgcgtccagctacacccgcgtgacggtggaatcaaatcgtcagctgaaatataagcagttcgcgttgagtaaccctgaacgcgtggtggtggatatcgaagatgtaaacctgaactcggtactcaaggggatggcggcacaaattcgtgcagacgacccgttcatcaagtcggcgcgcgtcgggcaatttgacccgcaaaccgtacggatggtttttgaattaaagcaaaacgtaaaaccgcagctgtttgcccttgcgccggtcgccgggtttaaagagcgtctggtgatggacctctatccggccaatgcacaggatatgcaggacccgctgctggcgctgctggaggattacaacaaaggcgacctcgaaaagcaggtgccgccagcgcaaagtggtccacaaccgggtaaagcagggcgcgatcgtccgattgtcattatgcttgaccctggccacggtggcgaagactccggtgcggtggggaaatacaaaacgcgcgaaaaagatgtggtattgcaaatagctcgccgtttgcgctctctgatcgagaaagagggcaatatgaaggtgtacatgacgcgcaatgaagacatcttcattccattgcaagtgcgcgtagcaaaagcccagaaacagcgtgctgacctgtttgtctctatccatgccgacgcctttaccagtcgtcagccgagcggttcctctgtgtttgcgctctcaaccaaaggtgcaaccagtactgcggcaaaatatctggcacaaacccagaacgcctcggacttgattggtggcgtgagcaaaagcggtgaccgctatgtcgaccacaccatgttcgatatggtacagtcgctgaccattgccgacagcctgaagtttggtaaagcggtactgaataagctcggtaaaatcaacaagctgcataaaaatcaagttgaacaggccgggtttgccgtactaaaggcaccagatattccctccattctggtcgaaacggcgtttatcagtaacgttgaggaagagcgtaaactgaaaacggcgactttccagcaggaagttgcggagtctattcttgcggggattaaagcgtattttgccgatggggcgacgctggcgagaaggggatgataaaaaggcgctgaatggcgcttttttatgggagaccagaaacaaaaaaacacccgttagggtgttcaataattggttgcgggggccggatttgaaccgacgaccttcgggttatgagcccgacgagctaccaggctgctccaccccgcgtcaccgtactgctttacttcatcaaatttgattggttgcgggggccggatttgaaccgacgaccttcgggttatgagcccgacgagctaccaggctgctccaccccgcgtcaccgtactgctttacttcatcaaattttaattggttgcgggggccggatttgaaccgacgaccttcgggttatgagcccgacgagctaccaggctgctccaccccgcgtccgtggatgcgcactatactccgctcgcgttttcatgcaaccttttttttaccccgatcacggatttggcatgattttgaacaaaaacaaatcactaaagcctattttttgtgcaaaatttgcgtcagggagaggctgctcatttcattaaacgcggcggtttgttatcttcgttgcgccttattttttaacctgaagaagagaacaatgaaaggacgttgggtaaagtaccttcttatgggcacggttgtggcaatgcttgccgcctgctcttccaaaccaaccgatcgcggacagcaatataaagacgggaaatttacccagcctttctctctggtgaaccagccagatgccgttggcgcgccgattaacgccggtgattttgccgagcaaattaaccatatccgtaattcgtcaccgcgtctgtatggcaaccagagtaatgtttataacgcggtgcaagagtggctgcgcgcaggcggtgatacccgcaatatgcgccagttcggcattgatgcctggcagatggaaggtgccgacaactatggtaacgtgcagtttaccggttattacacgccggtaattcaggcgcgccatacccgccagggcgagttccagtatcctatttaccgtatgccgccaaaacgtggtcgtctgccgtctcgtgcggagatctacgcgggggcattgagtgataaatatattctcgcttacagtaactccctgatggataacttcattatggatgtgcagggtagtgggtatatcgactttggtgatggcagtccgcttaactttttcagctatgcagggaaaaacggtcatgcctatcgcagcattggtaaggtgctgatcgaccgtggcgaagtgaaaaaagaagatatgtcgatgcaggcgattcgtcactggggcgaaacacacagtgaagccgaggttcgcgagctgctggaacagaacccgtctttcgtcttctttaaaccgcaatcttttgctccggtgaaaggggcaagtgcggtgccgctggttggtcgcgcgtcagttgcctctgatcgttccattattccgccaggtactaccttgctggcagaagtgccgttgctggataataacggcaaatttaatggtcagtacgaactgcgtctgatggtggcgctggatgtcggtggtgcaatcaaaggccaacacttcgatatctatcaagggatcgggccggaagccggacaccgcgcaggttggtacaaccactatggacgtgtctgggtgctgaaaaccgccccgggcgcaggtaacgtctttagcggctgatgtgatattctgtatgccgtttttacggatatgacagggtgaggggtaacctcacatcctgattattgactaagtgcgcgttgttcatgccggatgcggcgtgaacgccttatccggcctacaaatcatgcaaatccaaaatattgcaggagttatgtaggcctgataagcgtagcgcatcaggcatttatgcgtttagggtgagggataacctcgccctttttaattctgaggtgctatgtctgtggtaattagtgatgcatggcgtcagcgttttggtggcacagcgcgtctgtatggtgaaaaagcgttgcaactgtttgctgacgcgcatatttgtgtggttggtatcggtggtgtcggttcctgggcggcggaagcgctggcgcgcacggggattggcgcaatcacgcttatcgatatggatgatgtgtgcgtcaccaataccaatcggcaaattcatgccctgcgcgataacgttgggctggcaaaagcggaagttatggcggagcgtattcgccagattaacccggagtgccgtgtaacggtggtggatgatttcgtgacgccggataacgtagcgcagtatatgagcgtgggttattcgtacgtgattgatgccattgatagtgtacggcccaaagcggcgctgattgcttattgtcggcgcaataaaatcccactggtcacaaccggtggcgcgggtgggcagattgatccgacgcagattcaggttaccgatctggcgaaaacgattcaggacccgctggcggcgaagttgcgcgagcgcctgaaaagcgattttggcgtagtgaaaaacagtaaaggtaagctcggcgtggattgcgtgttttctactgaagcgctggtgtacccgcagtcagacggtacggtgtgtgcgatgaaagccacggcagaagggccgaagcggatggattgtgcatctggatttggcgcggcaacgatggtgaccgccacctttgggtttgttgcggtttctcatgcgctgaagaagatgatggcgaaagcggcgcgtcagggttaaacaatcaggtcggatgagacgcgaacgtcttatccgacccggttctgtgcttaaacctgcttcgtcgcagcgataatcgcctcgcttaacgcatttaacccctggctgcgtgaggcgctaagctgcgcacgtaatcccagctcatcaaacaatgccagtggtgactgtgcctgcaactcggcggcggttttcccctcaacggcagtcaacaacaccgccagcaggccgcgcacaatgcgcccttcgctgtcgccaaagaaatgcattttgccgttttcagccactgtatatcccagccagacgcggttttcgcatccggcaatctctttagcctgcgcttttaactcgtctggcaatgccggaagctgtttccccagcatgatcaactggcgatatttatcttcccattgcgtcaacggtgcgaaggtattgcgtaacgtttctgcggttacggttgtgccgaacggatgtccggcgaattgcgggtttgtcattaatccaccaataattccagcgcgcggtcaacggcattcaccagcgcatccacatcactctttgtattatatggcgcaaaagaggcgcgcagtgtgccggttacgcctaattctgccagtagcggctgagcgcaatgctgcccggcccgcagggcaataccgtactccgccagcagcgtcaccatatcgctatgatgaacgccagcaaaatcaaaggccagcaggctggaatcctggcagcggaatgaacgaaagccgggacgtttcgccagcgcatcttccgccagcgttgctaagctacggctccagctttcggcctggttgatatcgtaatctgccagccattccagcgccgcgcttaatcctatgacaccagcgacatttggcgttccagcttccagtttccacggcgcagattgagtcgtgaagccgtcaaaactcacttcgtgaaccattttgccgccgcccagccagggcgacatcgcctccagcagttctgatttaccatacagcacgccgatacctgtcgggccatacagtttgtgacctgaaaaagcatagaaatcaatatccagttgctgaacatccgcggggaaatgcactgccccctgagcaccatcaaccatcaccaccatcccggctgaatgagcaaaggtaatcgctcgcgccagatccgggcaaccgccagtaacgttcgacatctgacccaacgccagaatccgactacggggagtaatcagttctggcaacaaatcgacatccggcagtcgctgcgcattaagcggcaatttcaccactttggctccagtttgttgggcgaccatcagccaggggacgaggttggcgtggtgttctgccacgctgacaataatctcatcgcccggttgcagacgcggacgcgcatagcattgtgccaccatgttgatggattcagtggtgccgcgcgtccagacgatagttttatcatccggtgcattcagtaattgcgccactttctctcgtgcagcttcataacgcgcggtcaggcgttgggcttcggcaaactggctgcgatggacgtttccggcgctcagactgtaaaactgttgggtggcttcaaccacggcttcaggtttaagcgcggtcgcggcgctgtcgagatagacgcccgcatcctgtagtgcgggaaactgggcgcgaaactgcgcgggattaaaaacgttcatggtactcctcggcttgatgcaccgatcgtgacgcaaaattcactttgatacaaggagagtgctaaccatcagaattatctggatatcctggcgaagccgcgtaagtaacatatgctgaatagtgttaggcgttaattttagcctgttaatcaatactattaagatttattaatcgctttaaggagaagatgatgaaaaagactgccgcaattatttctgcctgtatgctgacttttgccctgagcgcctgttccggttcgaactatgtgatgcacaccaatgacggacgtaccatcgtctctgacggcaaaccacagactgataacgataccggtatgatttcgtataaagacgctaatggcaacaaacagcagatcaaccgtactgacgtgaaagagatggtcgaactggatcagtaattcgcgatcgcaaggtaaaaaaaagcaccgcaattaggcggtgctacattaatcactatggacagacagggtaaatgtacaggaagtgaaaaaaggtagctttgctaccatggtctgaatcgcagaccaattgcaaacacaacaacacaacatcacaaccgtaagccaaaagttcaccagaacacgcattccgataaaacttttcgttccggctcaggaagtgccgccactataggtatttgctggtagaagctcaacggacaatttataatggctcagattaaaaaaactaataggttacatagtgtgatctaattgttaaattcatttaacatcaaagtttaatagccatgtctaaacgattaccaccgctaaatgccttacgagtttttgatgccgcagcacgccatttaagtttcactcgcgcagcagaagagctttttgtgacccaagccgcagtaagtcatcaaatcaagtctcttgaggattttttggggctaaaactgttccgccgccgtaatcgttcactcctgctgaccgaggaagggcaaagctatttcctcgatatcaaagagatattttcgcaattaaccgaagcgacgcgtaaactccaggcccgtagcgccaagggggcgttgacggtcagtttactccccagtttcgccattcattggttggttccgcgactttccagctttaattcagcttatccgggaattgacgttcgaatccaggcggttgatcgtcaggaagataagctggcggatgatgttgatgtggcgatattttatggtcggggcaactggccggggctacgggtggaaaaactgtacgccgaatatttattgccggtgtgttcgccgctactgctgactggcgaaaaacccttgaagacaccggaagatctggctaaacatacgttattacatgatgcttcgcgccgtgactggcagacatatacccgacagttggggttaaatcatatcaacgttcagcaagggccaatttttagccatagcgccatggtgctgcaagcggctatccacgggcagggagtggcgctggcaaataacgtgatggcgcaatctgaaatcgaggccggacgtcttgtttgcccgtttaatgatgttctggtcagtaaaaatgctttttatctggtttgtcatgacagtcaggcagaactgggtaaaatagccgcctttcgccaatggatcctggcgaaagccgctgctgaacaagaaaaattccgctttcgttatgaacaataatttacgtagggtacgaccatgaccagccgttttatgctgattttcgccgccattagcggcttcatttttgtggctctgggcgcttttggcgcgcatgtgttaagtaaaaccatgggggccgttgagatgggctggatccagaccggcctcgaataccaggcgtttcatacgctggcgatcttaggtctggcggtggcaatgcagcgtcgcatcagtatctggttttactggagtagcgttttcctcgcgttaggcacggtgttgttcagcggcagcctttattgcctggcgctgtcccatctgcgtttgtgggcgtttgtcactccggttggcggcgtgagcttcctcgcgggctgggcgttaatgttagttggtgctatccgtttaaagcgcaagggcgtaagtcatgaataaggttgtattgctgtgccgtccgggctttgaaaaagagtgcgccgcagaaattaccgataaagccggccagcgggaaattttcggttttgcccgcgtgaaagagaatgcgggttatgccatttatgaatgttatcaacctgatgatggcgataagttaatccgtgagctgccgttcagttcattaatttttgcccgccagtggtttgtggtgggggaactcctgcagcatttgccgccagaagatcgtattacccccattgtcggcatgttacagggcgtagtagagaagggcggtgaactgcgtgttgaagttgccgataccaacgaaagcaaagagttactgaaattctgccgtaaatttactgttccgctacgcgctgccttgcgcgatgccggggtgctggcgaactatgaaacgccgaagcgtccggttgtgcatgtattctttattgcaccaggctgctgctataccggttactcatacagcaacaataattcgccgttctatatgggcattccgcgcctgaaatttccggcagatgcgccgagtcgttccacgctcaaactggaagaggcatttcatgtgtttattcctgcggatgagtgggatgaacgcctggcgaacgggatgtgggcggtggatttaggcgcttgccctggcggctggacctaccaactggtgaagcgcaacatgtgggtttattccgtcgacaacggcccgatggcgcaaagtctgatggataccggacaggtgacgtggctgcgggaagacggtttcaaattccgtccgacgcgcagcaatatctcctggatggtatgcgatatggttgaaaaaccggcgaaagttgcggcattgatggcgcagtggctggttaatggctggtgccgtgaaaccattttcaacctcaaactgccgatgaaaaaacgctacgaagaagtgtcacacaatctggcgtatattcaggcacagcttgatgaacatggcataaatgctcagattcaggcgcggcagttgtatcacgatcgcgaagaagtgacggtgcacgtccgccgcatctgggctgcggtgggtggtcgtcgcgacgagcgataacaggcaaggccggggcgtcgtctccggcctgctaccctttccgtcaggctgttaccaaagaagttgcaacctggcgctcatcagaaataatgtgcgttacctcatccagatgcccgatgcgggcttcccctgaacgattaaatttacttttatcaatcaataacaacgattgcgcggcacgttttaatagcatcgatttgtaatcagcgttgatcgcattggagtcccacagtgcgccgctgctatcgatcccttcacaagaaaaaataaacagatcgatttccagcgatttaagttgggaaatcagcgagggattgacgtaacagccatatttgcgctcaagtgtgccgccggaactgatcagttgaatgcgttcgcgtttaccgagttcatggcaaatcggatggctattggtgaagacctgaatgttgatgtcaggcaactggcgtgccagataccagcaagttgaactggcgtctaaggctatcaccatcccttcttcaatccacgcgagcgcctcgcgcgcgatatctgctttatgcgcataatggcttttcagcctgatgtgaaagggatcgccactgtcttgattttgacggtggatatatttagcgcgtccatgattgcgcagaattttaccctgcgtctgtaattcattgagatcgcgacgaatggtttctttactgacctttagctgttcagagagagcttccgtggtcaggctggtatggttcagcagcaggtcgactatcgcttgctggcgtgccgctttcatatttttcaccccatcattcgataaccgcccgcgtcatgcgggcgtaccggtatgagattacggtgttacccctttttttaaaagaatattcccgtacttcgctcgttcgcctgtgataacgatcgcaaaggctttttgcgcccgttcataaaacgcaaaacgattgatgcggatgatgtcaggacacggggcttgtagtgaaagcgcattacggtaacgtcgttctacttcaggatcgagagtgtcaccttctaccgccgccatcatcaccagcggcggtgcataactgtccagttcaaataacgggataatcgcctggagcaagtcgctcaccaacaggccatcagcgcggatcacctgcggtcccatcgaatgggcgggaaagtgagcatcggaaaaaataatttcatctccatgtcccatctctgccagcactttcaatagttcgggagaaattaacggcgaaattgttttcagcatttcacacttcctctataaattcaggttcagtttgcgggtagaaataacggtactgataatgaatctgtgcgcgggcttcttccgggctgttaaattcccctacgccataccaaccgaacagcgcagctcctgcgacggtcgtttcggcgtcgtcgagaacttttaccggaatatcaagcatattggctttaatctgattccacaatgtgttgcgacttcctccaccgactaacaataattcagaggccttaaagtgcccgattttttccagcatctgtagattgcgctgtaattgcgcagttaacccttccagcgccgcgcgatagaaatgcccccgcgtggtattaagcgtcactccttgccagccagcgttctgacacgacaataaatcacactgcatttttacgccatccgcgccaggcgcgatcagacgagcttcttcaatcaacatttgccagggtgtttcagccgtccagaacagttttctcacccattccagcacgccggatgccagccattgcatacctgggttatacaaccctgcctggctatccagttcgcaggtggaaccggcgtactgacttaacagcgaagtatcaacctgggcgctgcgaaccattaaaatttcccatgtaccggaagagagcacgggttcattttgttcagcaccagcgccaaaaagggcgaactgggtatcgtgacctgcggaaatcaccggtatgccaacgggtaagccgagcattgctgcggcgctgttctgtagcgtaccaatctgttcacccgcttccaccagacgagggaagagtcggcgtggaataccggtggcttgtaaaatttgcggactgaaatcgcgttgctggatatccagcatctggctggttccggccatcgtgatatcagtagtgaattcgccggttaaacggtggttaatcagcgacgaaataaagagccaggcgtgcgcgcgttccagcagttgtggatgattttctttcaaccacaccaacttatataacgtattgaaactaaaggctccgacgccagaaatagcctgcaaccgctgtgcggagattaaccgttcaatattgtccataaccgctgctgttcgcggacatttccagctaataatcggatagagcagattgccttgcttatctaccagagcgccatccacaccaaaggtggtgacggcgataccgcggatgtggcattcagtcagttcactattgatttgccgacagcaatcagcaaagcgttgcaaaatggcgtctaaagaccactggtgccaggtgttgttttccatcgcgatatcgctggcattaggcgttgaggcgcgggcaacaattttgccctgccgattaaccgcgatggccctgacattggtcgcgccacagtcgagtaccaggataacttcttgtttcataatcgctcctgcaatatagccggataacattgcttatccggctaaccactcttgcttgttcaggcccggtagccggagcgaccgggcatcacatcagggagtaatgtattaacgcttgtacaacggaccgtagttctggcaagcgcggtaatcctggccttcaatatccatgccgtgcgcagcccaggcagaaggacgatacactttggtctcttcaacgttgtgcatacataccgggatacgcagcatggaggcgagagtgataaagtctgcgccaacgtggccgatggtcagaaccccatggttagcgccccagttcgccattaccgagtacacatccgtaaacggccctttaccggtgaggcgcggtgcaaaccaggtggttggccaggttgagttggtgcgtttgttgaggatgtcatgcacatccttcggcaattccacgctccagccttccgcgatttgcagtaccggtcccaggcctttgatgatgttgacacgagtcatggtgaacgggacgccgccttcggtaaggaagcgggaagagtaaccgccgccacggaagtattcgtggatcgccgggcaccattcggtagcggcgaggcaagcgtcagcctcttgctgagagatttcccagtgtggcttcatcgtcgggttaccttcgctgtcgcgttgtttacaggaaccgtccagcgcagcagaaccggagttgatcaaatggatgatgccgtgttctgccagtccatccagtttatgccccgttacacgctcaattgcttctggtgaccagtaggtacgcacatcggcaaatacctgagcggtgccggtgagctggtgacccattagcattgccacgccgttaagactgtcgttttcggtcgccacgacaaagggttcgcgcacgccattccagtcaaatgaactgttgaggatcgcttcggcggtgtcaccattgggatattgatcggtccagtgacgttgcccctggaagcccgcagcgatggcgttgtagccaagtgattcttccacgcgaccaatatcggccagtttgctgttgccttgcatcatgtcgcggatacacatcgccatcagtaaactttcgcgcagaactgcgcggctttgctcggcattacgttgatactgtttgttattttcatcttcgccatagcggaagtttttatcagcccaggccagtgccatttccaattcggcttcgtcgtaaatcttctgatcgatacggcgacgcagttcggtcatatccaccgcctggactttcattcccagccaggattcaaagaagttgtgatcaacaatggaaccggcgatacccatcgaaacgccgcccagcgacagatagcttttacctttcatgctggcgacggccaaaccggcgcgggcaaagcgcagcagtttttcttcaacatcggcaggaatcgatgtgtcatcggcatcctgaacgtcatgaccgtaaatggagaatgctgggatgcctttctggctgtgagctgccagagccgctgccaggtaaacagcgccggggcgttcagtgccgttaaagccccaaatggccttcgggcgggttggatccatgtcgatggtttcactgccatagcaccagcaaggcgttaccgtaatggtgaggcctacattctgactgctgaatttttcttcgcaagcagcggcttcagccatacccgcgatacaggtatcggaaatgacacactcgacggcagctccgcaggcatggcgcagtttctcggtcagcagtgcggccgtagctttcgccatattcattgtttgttcttcaagcgactcacgaacacccatgcgacgaccgtcaataaccgggcggataccaattttcggtaagctgatttttttcattacagattcctcactttattcggaaaatatgttcagttagttgccgtttgagaacggaaacgggcaaagataaagatgaccgcgaagcagagtgcggggatcagttcagcagtggggatgttgcccgccgcgtcactgacaaaacccatgaccggagtgacaataccgccgccaataatggtcataacgatgaaggacgaaccatatttggtgtcctggccgagattcttaatgcccagcgagaagattgttgggtactgaatcgacataaaggcgctgcataaagtcagggctattaagcccacatgaccgccagcgaaggctgagatcaggcacagtgccatagcgattaatgcgtaggcggccaggactttgtgtggtgcgaagcgactgatgagccaggtaccggtgaaacgaccaataaagaagcacaccatggttccggttaaatagttagcggcaaagcctgcagtcatacctggaatttcttctacagcgtagcgaatcaaatagctccagcaggccgtttgtgcgccgacatagcagaattgcgctaataccgcccagcgccagtggcgaatacgcgccaggcgagaaagcgatgcggagaacgatccttgtttggcgtcactgtgattatcactctgcaatgccgggaatttcgtcagcatgatcagcagggcgaccagtaacacgatagccacgatgatcatataaggtgtctgtaccgataataccaggctgtgtttatacgcactcaattgctctggagacattttatcgagaacgtcttgcgattgatgtggcacgttagacaaaataagactttgcccaaagacaaccgcgataattgcgccaaacgagttaaatgtttgcgcaagatttaagcggaagtgaccactactttccggccctaataccgtaacaaaagggtttgcggcagtttccagacaacctaatccggctgcaataataaataggccaactaaaaataaggtgtagttcattatttctgcggcgggccagaataatgcagcacccaaggcatataaaaataacccggtaataatccctgctttataactgagttttttcatcaatatcccagcagggattgggataatgaaataaccaaagtaaaaggccgattggatcaggccagcttggaaatttgtcagcgtaaaagcctgctggaattgaggtaataaaatgtcgttaaggttattggctaccgcccaaagaaaaaacagtgagcacagcagcgcgaatggaataatgtaacttctgctttgccctgcatctttatctaccgcacggtaactctgcgtttgtattgatgtgtttcccatagcatcctcttaggttcagaagcttaagcacgtaatcggttatgttttcaaaagtgcaaaaccagcgagttcgggcttcatatcagtgaatatttgcctgtctgaaatgaactcatggattcattttcaaataaaaaacgctctgtaatatgacggcggtcacacttattagctagaaggtgactttatgtgactaccatcactttaataatcgaaatttcatgcccgtttcagaaaataaatcataaaaaacacaaatcagatgaccgtattaattgtttgtgccgaaaacggtcattccgggcttggaggaatagaaaaatgaccgttttgataaatatttttaagagcggtcatttttaatggggttataaaaagagaacttgcagttatttactgtgattagttgaaccaggtcacaaaatataagcttgtgaatttctttcttgttaatcaggaagaagatggtgggtaattaaacggctaattcaatagtgtgaaaggaacaacattattgccctgttttgaatcagagagaggtagctaatggaacgaaataaacttgctcgtcagattattgacacttgcctggaaatgacccgcctgggactgaaccaggggacagcggggaacgtcagtgtacgttatcaggatgggatgctgattacgcctacaggcattccatatgaaaaactgacggagtcgcatattgtctttattgatggcaacggtaaacatgaggaaggaaagctcccctcaagcgaatggcgtttccatatggcagcctatcaaagcagaccggatgccaacgcggttgttcacaatcatgccgttcattgcacggcagtttccattcttaaccgatcgatccccgctattcactacatgattgcggcggctggcggtaattctattccttgcgcgccttatgcgacctttggaacacgcgaactttctgaacatgttgcgctggctctcaaaaatcgtaaggcaactttgttacaacatcatgggcttatcgcttgtgaggtgaatctggaaaaagcgttatggctggcgcatgaagttgaagtgctggcgcaactttacctgacgaccctggcgattacggacccggtgccagtgctgagcgatgaagagattgccgtagtgctggagaaattcaaaacctatgggttacgaattgaagagtaatttcgtaaagcaacaaggagaaggatgatggctaacagaatgattctgaacgaaacggcatggtttggtcggggtgctgttggggctttaaccgatgaggtgaaacgccgtggttatcagaaggcgctgatcgtcaccgataaaacgctggtgcaatgcggcgtggtggcgaaagtgaccgataagatggatgctgcagggctggcatgggcgatttacgacggcgtagtgcccaacccaacaattactgtcgtcaaagaagggctcggtgtattccagaatagcggcgcggattacctgatcgctattggtggtggttctccacaggatacttgtaaagcgattggcattatcagcaacaacccggagtttgccgatgtgcgtagcctggaagggctttccccgaccaataaacccagtgtaccgattctggcaattcctaccacagcaggtactgcggcagaagtgaccattaactacgtgatcactgacgaagagaaacggcgcaagtttgtttgcgttgatccgcatgatatcccgcaggtggcgtttattgacgctgacatgatggatggtatgcctccagcgctgaaagctgcgacgggtgtcgatgcgctcactcatgctattgaggggtatattacccgtggcgcgtgggcgctaaccgatgcactgcacattaaagcgattgaaatcattgctggggcgctgcgaggatcggttgctggtgataaggatgccggagaagaaatggcgctcgggcagtatgttgcgggtatgggcttctcgaatgttgggttagggttggtgcatggtatggcgcatccactgggcgcgttttataacactccacacggtgttgcgaacgccatcctgttaccgcatgtcatgcgttataacgctgactttaccggtgagaagtaccgcgatatcgcgcgcgttatgggcgtgaaagtggaaggtatgagcctggaagaggcgcgtaatgccgctgttgaagcggtgtttgctctcaaccgtgatgtcggtattccgccacatttgcgtgatgttggtgtacgcaaggaagacattccggcactggcgcaggcggcactggatgatgtttgtaccggtggcaacccgcgtgaagcaacgcttgaggatattgtagagctttaccataccgcctggtaaatgcgctgatgtgataatgccggatacgacgtttgcggcgtatccggctcgccgttaccgtaccaaccgcaattgctgtaaattgccgtcgatatgcaaatcggtttgtaagcgggcaatatcgcggcacagaaacgccatctctttatgggtttctaattttttgcgccacttttcggcaaccgcatccagattctcatatatcccttccagactctgaaactcgaccagcagctgcgtggcgctttttggtccgattcccgcaacacccggtacctttgaactgctgatccccgcaagtccccagtaatcgggcaactgctgcggttgaacgccaaattctttatcgataaatggcgcatccagccaacgtttctggaagtaatcacgaatacgtaatgtcggtgaaagtaactgacagtagcctttatctgtcgaaacaatcgttgcctgatgcccggcctgtgtcactttgaccgccagcgtggcggctaagtcatcggcttcgttgccgctggttgaccagcacgggacgccgcgttgctcaaaggcggcgcgtaatgcaggcatctcgtcgtgcaactcttccggcattggcggtcgacccgctttgtaatctggtaaacgctgatgacgccagccgctactgcggttttcatcatcaaaaacggcgaccgcgtgggttggctggctgtgcataatgagctgatcgagcgcatgctggcaggtttcgacacagggcgacccctgaacggcatgaatgcgacgaataagattcagtgcatcgacaataagcaaatgaacagccacgataacccccttaaagatcaggcgataagggtaacattcgatgccggaacaggctacggctggatgagaaatcgggaagaggcctcgcaaaacgaggcctctggagagcgattaatcgcaggcaacgatcttcattgccaggccgccgcgagaggtttcgcggtacttggcgttcatatctttacctgtttcgtacatggtttcgataactttatcgaggcagacgcgcggctcgctggtacggcgcagcgccatacgtgcggcgttcaccgcttttactgccgcaatggcgttacgctcgatgcatggcacctgtacctgtccggcgaccgggtcacacgtcagaccgaggttgtgctccatggcgatttccgccgcgatgcacacctgcgccgggcttgcgcctaatagttctgccagaccagccgccgccattgagcacgccacgccaacttcaccctggcaacccacttcagcaccagaaatcgacgcgttcatcttataaagagaaccaatggcgctggctaccagcaggtaacgagccagtgagttagcgttcacttcgcggataaacttgtcgtagtacgccagaactgccgggataatcccgcacgcaccgttagtcggcgcagtcaccacgcgaccgccagcagcgttctcttcgttcactgccagtgcaaacatgttgatccagtcaacaaccgccatcgggtcagtggtggttttatcctggctgaccagcatccggcgtagtgccgcagcacggcgtggaacgcgcagtttgccaggcaacacgccttcggtggaaataccgcgctcaataccgccgcgcatgacttcccagacgttcgccaggtgctgttccagctcttctttgctgtgcagcgccagctcgtttttcatcatcaggccagagagtgacagcccggtttcctgacaatgtttttgcagatcggctgctgaactgtacggataaggaacttcaaccggtgcgctatcctgctggccaaaatgctcttcatcaacgataaagccaccgccaatagagtagtaagtctggctgtaaacgactttatcgcccgccagcgcggtaatgcgcataccgttttcatgcagagaaaggttgtcggcgtggaagttcatgcactgatcaaccgggaactccacttcatgctgaccgtttgccagcatcaggcgaccatgagtattcacatcctgaataaaactggggatggaatcgatatccacggtatccggcaggttacccgccaggcccataataatggcgatatcagtgtggtggcctttaccggtcagagagagcgagccgtacacgtcaaccaccacgcgggtcacgtctttaagcaggttacgggcaatcagatcgtcggtaaattgtttacccgctttcattggtccaacggtatgagaactggaagggccaatgccgattttgaaaatatcgaatacgctaatcataggaaatacatcgcgttaaaacggaggaagcgccgcccgaaagcggcgcgaaaggacttagctgaacagagagtagaagattgcggagattgcaatcagacccatcacgacaacgaatacgttgctgatgtgaccgctgtacttacgcattgccggtactttctgaattgcgtacatcggcatcaggaacaggatcatcgcgatgattggaccgcccagggtttcaatcatacccaggatgctcgggttcagggtggcaacaatccaggtcgttaccagcatgaacagcgcagtgatacggttcagcttgttgatttcgatagacttacctttaccacgcagagatttaatcaccataccgttgaagccttcacgtgcgcccaggtagtgaccgaggaaggatttggtgatagcgataatcgcgataatcggagccatccacgcgataaccggtgcgttaaagtggttagccaggtaagacagaatcgagatgttctgctctttagccgcagccaggtctgccggagtcaggctcagtacacagctgaagacgaagaacattacggtcagcaccatcatgatgtgtgcgaatgccaggatcttcgagcatttctgttctgccatatcgccgtactcttcacgcttcgcaacggcgaaagaagagatgatcggagagtggttgaacgagaacaccattaccggaattgccagccacagggtcatccacagaccgtttccggttgcagatgcagtgtccagagacagcgtttccagtgcagcgccgttccactgcgggatcaggtacagagccagcagcatcagtacgccaacaaacgggaataccagaatactcatcgctttaacgatcatctgctcaccgaagcgaacgatggtcatcatacccacgatcaggatcagcgacagaatcgcacgcggcggtggcgtcatacccagctggtgagacatgaagctttcaacggtattggtgattgccacgctataaaccagcaggatcgggtagatagcgaagaagtagagcagggtaatcagtttacctgcgccaataccaaagtgttcttctacaacctcggtgatgtcttcgcccgggtttttaccagacagtacgaagcgagtcaggccgcggtgagcaaaaaacgtcatcgggaacgcaaggatagccatgatgatcagcgggatcataccgccaacaccggcgttgattggcaggaacagcacgcccgcgccgattgccgtgccgtaaaggcccagcatccacatggtgtctgtcttgcgccaggcactacgagagtctttcgacgcaatcgtgctggtttgagtcgtttccatctatttctcctggaggaatgcaaataattcagcttttagccagttcagcccgggaaggtgcctgaccgtaaaaatgaaatctgtctatcggcgatggcttaatcatttaccgccgtaataatttgagggcggaaagatacacacaagttatgtatctatcagtgatcttgatctcaaatacaataatctacttggaagatagattatcccaacgctttactctgtaaatcaaaagtaaaagagaatttaagggcaatatttgcccattaaacgacatctgacttcttccggggcgcgcaatatatgtaggttgaactgaaaaaatcaatacttttagttaatcatggcgataatttctttttcatagcgataaaatacggtttatgaaaatagggaaacgtttgcgttgcaacataaattgtatgacatattaactgtgatgatatttgtcgcgtgagggtggtaagaaacattcatataacaaatgaaatgagttgatgagtaagtgaccaaaaacgagaaaacccggcaacaaacgtcaccgggggagcggagattacgtgcagatttcgtagcaagggatgtaggctgagcctggcaacttcatacgatgctgggcaacaaaaccctgtagcaggtcgtccatacgacgcataatctctttatcgccgttgattttgtaaggaccaaactcttcaatggcgcgaataccgacttcttttacgttacccgccacaataccggagaacgcacggcgcaggtcggcagccagcacttcaacaggttgatccgggtaaagcttcagattagccatattctcgtgagacggctcaaacggcatttgcaaatctggcgcaatgcgcattgaccagttaaagctgtaggcatcgcctgtatcacggcgattttctttcaccagcggcatcgattttttcatctgacgagcgacttcagcggcgtcatcaatgatgatgcggtaatggcggcgcgcgttttcacccagcgtatgcacgacaaactcgtccagtacgcggaagtagtcggcgctctctttcgggccggtgaggatcaatggtaaaacctgatctttgttggccgggttcattaaaattcccagcaaatagagcaactcttctgccgtacccacaccgccagggaagataatgataccgtgagcgatacggacaaacgcttccagacgtttttcgatatctggcatgatgatcaattcgttgaccagcgggttaggcggttcagcggcgataatcgacggctctgtcataccaataaaacgactgtctttgtaacgctgctgcgcgtgtccgaccgcagcacctttcatcggcgcttccatcgctcccggaccacagccggtgcagatattcagctcacgcaggcccagctggtttccgacgcgacgggcatacaaatactcgttttcgttaattgagtgaccgccccagcagaccaccatatttggcgcttcacccacatgcagcgcgcgagcgttacgcaagatggaaaagaccaggttagtgatgtggacggagttgtcgagattcaggttgggaaaacgaacggtgttatggatttgcccgtaaacgaagagaatgtcacgcaggaccgcgaacaagttggcctgcaaagcgcgaataattcgcccatcgacaaaagcctcttccgggggattaatcagttccagctttacgccgcgttcacggcgcaagacgttaatatcgaaattttcaaaacgagacagcaattctttgctgttatcggtcaaactaccggagttcagtacggcaagtgaacagttgcgaaacagttgatagaggtcgctgctggcggtgcgtttaagcatatccacttccagctgcgacaacatatccatggagccaagcgggctaatatgtgtaatcaagaaaaactccttatgggacgaatatcgtcattccctttgattacaatagccctgcctgatgacctttcacaaccttctgcgtgaatccagcacgcaaaattgagaaaaaatttattgccgaaccagtcttgtggtcgatgggacaaaatcgctattactgcgccacgggttaatgtccagaccgccacgacgggtataacgtgcgtaaacgctcaatttctctggctggcagaagcgtaacaggtcattaaagatgcgttccacgcactgttcgtggaactcgttgtgatgacggaatgagaccaggtaacgcagcagtttttctctgtcaatttggcgtccacgatactgaatttggatcgaaccccaatctggttgatgggtgatcaggcagtttgatttcagcaggtggctgacgagcgtctcttccactactttttcaccactggtggcattctccagatagtcagtagtgaattcatagttatcgatagtgatatcctggtcatcaatgcaagtgccattgaaatgacctatcggctggccttccagttcatcaagacgatataacgccacgctaacctcaccctgagcgcaagtgcttaagtcgcgctccagcgtctggcgcacctcatcccagttattaaaacgcgtctggttaaaactgttgagatagagcttaaaactcttcgactcaatcagatttacgctggtgtaatcaagttcaacatgaccgacagcgacctgcggcaaacctttcgcattcagccaggaaagttcatacagcgtccagatatccgtaccgtgaaaaggcaggttatccgctttcagacccagcgggtcgcgattcaggctgcgtggaacgccttgcagtaggctggcgtcataggtatcccggtaatcggttgattttccaagagtcaggcccgcaagtgcctgatggtttgcataagaagacatgtttcaccgtcataaaccagataaactaaacgacaagtgtatctggtttaagtgaagagagaaattagtggacgatttgaccgcacaagccctgaaagattttactgcacgctactgcgatgcgtggcatgaagagcataaaagctggccgttaagtgaggaactgtacggcgttccttcaccgtgcattatttcaactactgaagatgccgtatactggcaaccccagccgtttaccggggaacaaaatgtaaacgcggttgaacgcgcttttgatattgtgatacaacccacaattcataccttttatacgactcagtttgccggggatatgcacgcgcagtttggcgatatcaaactgacattgctgcaaacctggagtgaagacgacttccgtcgggtgcaggaaaatctgattggtcatctggtgactcagaaaaggctaaaactgccacccacgctatttatcgcgacgctggaagaagagttagaggtcatctcggtgtgtaatctctccggtgaagtgtgcaaagagacgctgggaacacgtaaacggacgcatttagcctcaaatcttgcggaattccttaatcaacttaagcctcttctgtaatccaaataccccatctggttgtgagagatctcttacagactctgtaggagatcgccaggaaataagcgaatacttaaaaagataagaatcgttattttcatttaaaaacaacatgttgcttgttaattcctaactttcatatgaaattttccttaaggcattgtctgtaagcgccttgtaagacttcgcgaaaaagacgattctatcttcgtcgacagggagtcagacaacgaagtgaacatcaggatgatgacacttctgcaggacacaccaggatggtgtttcagggaaaggcttctggatgaagcgaagaggatgacgcaggacgcgttaaaggacacctccaggatggagaatgagaaccggtcaggatgatccggtgggtcaggaaggccagggacacttcaggatgaagtatcacatcggggtggtgtgagcaggaagcaatagttcaggatgaacgattggccgcaaggccagaggaaaagttgtcaaggatgagcagggagcaacaaaagtagctggaatgctgcgaaacgaaccgggagcactgtgaatacagtgctccctttttttattcctgctatccttcgcggcagtttttcttattgaggttgctttatgaccactcatgaccgcgttcgtctccagttgcaggcgcttgaagcgttactgcgtgaacatcagcactggcgaaacgatgaaccccagccgcatcaatttaacagtacccaaccgttctttatggacaccatggaaccactggagtggttgcagtgggtgctgatcccacgaatgcacgatttgttagataacaaccagccgttaccgggcgcttttgccgttgcaccctattatgaaatggcgctggcgacggaccatccgcaacgcgcgcttattctggctgagttggaaaaactggatgctctttttgtggatgatgcgagctaatgctggaaatactctatcaggatgaatggctggttgcggtaaataaaccctccggctggctggttcaccgcagctggctggatcgcgacgagaaagtagtggtcatgcaaaccgtgcgtgaccagataggacagcatgtttttactgctcatcgtctggaccgacccacttctggtgtgttgttgatggggttatccagcgaggccggacggctgctggcacaacagtttgaacagcaccaaatccagaaacgttaccatgcgattgtgcgcggctggttgatggaagaagcggtgctggattatccactggtggaagaactggacaaaatcgctgataaatttgtccgcgaagataaaggcccgcagccagcagtgacgcattatcgcggtctggcgaccgtagaaatgccggtagcgaccggacgttacccgaccacgcgctacggcctggtggaactggagccgaaaaccggacgcaaacatcagctccgtcgccatcttgcccatttgcgtcatccgattattggcgatagcaaacatggcgatttacgccagaatcgcagcggtgctgagcattttggtcttcagcggttaatgctgcatgccagtcagttgtcattgacgcatccttttactggcgagccgctgactattcacgcgggcctggacgacacctggatgcaggcgttatcacaatttggctggcgcggtctgcttcctgaaaatgaaagggttgagttcagtgcgccatcgggtcaggatggagagataagttcctaatccagggagaaaacggtatggcggaaattggtatttttgtcggcaccatgtacggaaattcgctgttagtggcggaagaagcagaagcaattctgaccgcacagggccacaaagcaacggtatttgaagatcctgaattaagcgactggctgccctatcaggataagtatgttctggtggttacgtccacgaccgggcagggcgaccttcctgatagcattgtgccgctctttcagggaatcaaagatagtctgggcttccagccgaatctgcgttatggcgtgattgcgctcggcgacagcagttatgtaaatttctgcaatggcggcaaacagttcgatgccttgttgcaggaacagagcgctcagcgggttggcgaaatgctgttgattgacgccagtgagaacccggaaccggaaacggaatcaaatccgtgggtcgaacattggggcacgctgttgtcctgatatgttcagcgagcggtaaatgccgttttagcggtgctgaatcgaatcttttcaggcaaatgccagtaaaaactgcttcatagcgcggatttttactggcgtttgcctggagtcaagcgatccatttcatactcttctttatttcttcgttttaacccttcctttcttgttcttgttttcatttccgtgaagtggattccaccgtccagggctaatgccaaaatcgggcctcattgaacgcattaatgttgtgttgttgcacggtgagccgctatggcgcgctttttatactgctattgccagatataaacacgcgccgtattcggcgaacgacctataaaaacggcaaaaaacaccctacgtcacctctgatttcctggcgatgtcgcagtccagagtgagcgtggctaacgcgaattttcaggagtgcaacaatgagttctttaagtcaggctgcgagcagtgtggaaaaacgcacgaatgctcgttactggatagtggtgatgttgtttatcgtcacatccttcaactacggcgaccgcgctacgctttctattgccggttcggaaatggccaaagatatcggccttgatcccgtgggaatgggctatgtgttctctgccttctcatgggcttatgttatcgggcagatccctggtggttggttgctggatcgttttggttcaaaacgcgtctacttctggtcgatctttatctggtcgatgtttaccttgctgcaaggcttcgtcgatatctttagtggattcggcattatcgttgccctgtttactctgcgcttcctggtcgggcttgctgaagcgccatctttccccggcaacagtcgcattgttgcggcctggtttccggcgcaggaaaggggaacggcggtgtcgatttttaactccgctcaatacttcgcaacggtgatcttcgcgccgattatgggctggctgacgcatgaagtgggttggtcacacgtcttcttctttatgggcggtctggggattgtcatcagctttatctggttgaaagtcatccacgagccaaatcaacatccgggggtaaatcagaaagagctggagtacatcgccgcgggtggcgcgctgatcaatatggatcagcaaaacaccaaagttaaagtgccgttcagcgtgaagtgggggcagatcaaacagctgctcgggtcacggatgatgatcggcgtttatatcggtcagtactgtatcaacgccctgacttactttttcattacctggtttccggtttatctggtgcaggcgcgtgggatgtcgattctgaaagcgggctttgtggcttccgttccggctgtttgcggttttatcggcggtgtgctgggtgggattatttccgactggctgatgcgccgcacgggatcgctgaacattgcgcgtaaaacaccgatcgtaatgggcatgttgctgtcgatggtgatggtgttctgcaactacgtcaacgttgagtggatgatcatcggctttatggcgctggccttcttcggtaagggcatcggggcgctgggttgggcagtaatggcagataccgcgccaaaagagatcagcggtctttccggtggcctgttcaacatgttcggtaacatttctggcatcgtcacgccaatcgcaattggttatatcgttggcacgactggctcgtttaatggggcgctgatttatgttggtgttcatgccttaatcgcggtactgagctacctggtgctggtgggcgatatcaagcgtatcgagctgaaacctgtcgcggggcaataagatgacgacacaatccagtcctgttattactgatatgaaagtcattccggtcgccggacatgacagcatgttgctcaatattggtggtgcgcataacgcatacttcacccgcaatatcgtggtactcaccgataatgccgggcataccggcattggtgaagcgccgggcggagaggtgatttatcaaacactggtcgaagctattccgatggtgctgggccaggaagttgcgcgcctgaataaagtggttcagcaggtgcataaaggtaatcaggcagccgattttgataccttcggcaaaggtgcctggacttttgaattgcgcgttaacgccgtggcggcgctggaagccgccttgcttgacctgttaggtaaggcgctgaatgttccggtctgcgaactgttagggccaggcaagcaacgcgaggctattaccgtcctcggttatctgttttatatcggtgatcggaccaaaaccgatcttccttatctggaaaatacgccgggcaaccatgagtggtatcagttgcggcatcagaaagcgatgaacagcgaagccgttgtgcgtctggcggaagcctcacaggatcgctatggctttaaagatttcaaacttaagggcggagtgttacctggcgagcaagaaatcgacactgttcgtgcattgaagaaaagcttcccggatgcgcggattaccgttgatcccaacggtgcctggctgcttgatgaagccatttctttgtgcaaagggctgaatgatgttcttacctatgccgaagatccatgcggcgcagaacagggcttctccggacgtgaagtgatggcggagtttcggcgggcgaccggcttgcccgtcgcgactaacatgatcgccaccaactggcgcgaaatgggtcatgcggtgatgctcaatgcggtagatattccacttgccgatccgcacttctggacgctttccggtgcagtccgtgtggcgcagctttgcgacgactgggggctgacctggggctgccattctaataaccatttcgatatctctctggcgatgtttacccatgtgggcgcggcggcaccgggtaatcctaccgctatcgatacccactggatttggcaggagggcgattgtcgcctgaccaaaaatccgctggagattaaaaacggaaaaattgccgttcctgatgcgcccggtctgggcgtggaactggactgggaacaggtacaaaaggcacatgaggcctataaacgtctgcctggcggtgcgcgtaacgacgcaggtccgatgcagtacctgatccccggctggacctttgaccgtaaacgtcccgttttcggccgtcattgattctgaaaaaggacataaatatgagttctcaatttacgacgcctgttgttactgaaatgcaggtcatcccggtggcgggtcatgacagtatgctgatgaatctgagtggtgcacacgcaccgttctttacgcgtaatattgtgattatcaaagataattctggtcacactggcgtaggggaaattcccggcggcgagaaaatccgtaaaacgctggaagatgcgattccgctggtggtaggtaaaacgctgggtgaatacaaaaacgttctgacgctggtgcgtaatacttttgccgatcgtgatgctggtgggcgcggtttgcagacatttgatttgcgtaccactattcatgtagttaccgggatagaagcggcaatgctggatctgctggggcagcatctgggggtaaacgtggcatcgctgctgggcgatggtcaacagcgtagcgaagtcgaaatgctcggttatctgttcttcgtcggtaatcgcaaagccacaccgctgccgtatcaaagccagccggatgactcatgcgactggtatcgcctgcgtcatgaagaagcgatgacgccggatgcggtggtgcgcctggcggaagcggcgtatgaaaaatatggcttcaacgatttcaaactgaaaggcggtgtactggccggggaagaagaagccgagtctattgtggcactggcgaaacgtttcccgcaggcgcgtattacgctcgatcctaacggtgcctggtcgctgaacgaagcgattaaaattggtaaatacctgaaagggtcgctggcttatgcagaagatccgtgtggtgcggagcaaggtttctccgggcgtgaagtgatggcagagttccgtcgcgcgactggcctgccgactgcaaccaatatgatcgccaccgactggcggcagatgggccatacactctcgttacaatccgttgatatcccgctggcggatccgcatttctggacgatgcaaggttcggtacgtgtggcgcaaatgtgccatgaatttggcctgacctggggttcacactcaaacaaccacttcgatatttccctggcgatgtttacccatgttgccgccgctgcaccgggtaaaattactgctattgatacgcactggatctggcaggaaggtaatcagcgcctgaccaaagaaccgtttgagatcaaaggcgggctggtacaggtgccagaaaaaccggggctgggtgtagaaatcgatatggatcaagtgatgaaagcccatgagctgtatcagaaacacgggcttggcgcgcgtgacgatgcgatgggaatgcagtatctgattcctggctggacgttcgataacaagcgcccgtgcatggtgcgttaagacagaaaaccaaaaccggctctgtcaggagccggtttgagactgatgccaaacacaaaattgcctgatgcgctacgcttatcaggcctacatgctttttaatttattgaatttaattggttttgtaggccggataaggcgttaacgccgcatctggcataaacacaggcactttgtcaccaatctgaaaccagcgtcataaaaagccgattgctactcgacaagacgtccgttacccgagaattttgctggcttcgcgcgcgacattatccatctcgtccaacagttccagcagctccggctccaaatcttcttctttagtaccgctacgtagctgttgttcgatcagttggcagagattcttcatacgcggcacaccgctatagccgcaactgccatgcagtttatgaatcaaatcaaccaggccttccgggttttctccaaccagctgttcctcaactttgttgcgaacttcaggcaggaaatcgagtaacatttgcagcatatcgcgcgctaaatcggtttttcctgctgcctggcgtagtgccagttgccagtcgagggtcgcattcgggttcaccacaatttcgttgacttcgggcgtcacgacgcgagacgaaataccgctgccaggcttgtagcgcaacaacaaattatgcaatcgctcttcttcaatcggtttcgccagataatcgctcatccctgcgccaagcagcttctctttttgcccggccattgcatgcgccgttaccgcgataaccggcgtttgttgctgatggggaagctggtggatgagctcgcaggcccgaatgccatccatgtcaggcatttgaatatccattaagatcaaatcgaacggcatctgtttcgcccgttcaaccgcctgatgcccgctatcgcaaagttccacatgttgcaccatatcttccagcaatgcgccgataagtttcaggttagcggggttgtcatcaaccgccatgactgtcattgccagcttactttcatcggttacaggcaaaagcgtgttttgtttgtgatgacaaaattccgtcagggcaggcagcaggcgcgtaggtgttaatggtttcagcagacacgcgccgataccatcttgcttgagtttttcagcattgacttgtgcatggcaaggaagtgccagcatcaggaaatcggtcatcgataccgctttcgctaatcgctcatgttgcattgttagcggctcgcggaaggtcaccgcgatgcctaacaacatcatgtcgtaatgcgcgggaggcagcgcggagaacgttgggctataaaccacttccagcggcgtttcacttaaaatatccagcgtgcattgcgctgctgcggagtttggttcgacataggccaggcgcttacctgcgaggcactgggtggatggcccttcgataataatgttcgggttcagatcgagattaatgtggaaccagaaagttgaaccgcgattcggctggctatggaacgaaatatcgccgcccatttcattaaccagtttttgtgtaatcaccagccccagcccggtgccaccatgacggcgggaaatactggcatcagcctgtcggaaggcctggaataagcgcgattgatcgcgttcaggaataccaatgccggtatcccgaatctgcacttcaatctgcactttggtattactcagcgcacgtttttctaccagaatatcaatgttgccattctcggtgaatttaattgcattccccaccaggttagtgatgatttgctgtaatcgcagtgggtcgccgatcacgttatcaggcacgtcgcttttaatattgagcgtcagttccaaccctttatcgtgagaagaatgtgccagcagagtaacgacttcatccagcgtgctgcgtagtgggaatggaatactttccagaatcagcttacctgcttccagtttcgagaagtcgagaacatcattaataattgccagcaaattatttgccgaacgttcaatcgtattcaggtgatcgcgctgcgttggtgttaattctgttttcagcgtcaggcgggtaaagccaataacaccattcagtggtgtacgcagctcgtgtgacatatttgccagaaactcggatttaatacgcgccgcttcctgggcgcgctttttcgccagatccaactcaacgttctgaatttccatctgctccagcgtttcacgcagatcggacgtcgcctggtcgatattgtgctgcatctcttcgtgataagcagccagcgacattgccatcgagttgataccgtttttcagcatatccagctcaccaagcataaatccttccacccggctgtcgagttgcccgcgacggatgcggtcgacggtattcaccatgttgcgaatcggaccggttacatcgcgcattaagcgccagccaaaaataagcgcaataccgatacaaaacagcatcatcacgctggaaataaagatctctttatattgctgcaagcgaaccgatttaagatccagctcaagcgcaatatatcccaacatattttgactatttttggcatcgctactgggcgattcgtcgggggagtaactctcagaaataatcggcgtgcggaggatcataatatcgccgtcacgagtgacagtgagctggcgaggaaacggcacgttgctgccgagctgcattgatgagggatcaagatgaaaattggaggtgacaaagagtcggttattttcatcataaaccgaaatcgcgcgaacaatatcggaatggcgacgatgcagtacgcttattaactgaccgatagattcgcgattttgcaggctcatgccatattcagtagaaactgcaagcggctcaataatgctggcaccggcatcttccagttgacgctgcaagtcgttatagcgatgcacgacgaaaaagatactcagcaataaaccaataaggacggtcggtgccaggatcagaatcatcatgcgtgcgcgcaggctgtagttggtcatggagttccgttatgggacaattaaggtcacactgttaaattgagaaagtctcgccaatggcgcaattctactctgcaaaacgacgcacgacgacgcgtcagatcataaccgtttcagtcaacgacctcgactcttttggtcagggcgtggcgcgacataacggcaaaacgctatttatccccggattattgccgcaggaaaacgcggaagttactgttactgaagataaaaaacagtatgcccgcgctaaagtcgtacgccggttaagcgatagcccggaacgcgaaacgccacgctgtcctcattttggcgtatgcggtggctgtcagcaacaacacgccagcgtggatttacagcagcgaagcaaaagtgtggcactcgcccgattaatgaaacacgaagtctctgaagtgatcgccgatgttccctggggctatcgccgtcgcgcgcgtttaagtctgaactacttaccgaaaacacagcaacttcagatggggtttcgcaaagcgggctccagtgacattgtcgacgttaaacaatgtcccattttagtgccccaacttgaagcattgctgcccaaagtcagggcatgcctgggcagcttacaagctatgcgccatcttggtcatgttgaactggtacaggcaaccagcggcacgctgatgattttgcgccataccgcaccgctaagttcggcagatcgcgaaaaactggaacgcttttcgcattctgaaggcctggatctgtatctcgcccccgatagtgagatactcgaaaccgtctctggtgagatgccctggtatgattcaaacgggttgcgcttaacttttagcccgcgcgattttattcaggtcaatgcgggtgtgaaccaaaaaatggtagctcgtgcgttggaatggctggatgtgcaacctgaagatcgcgtactggatctgttctgcggtatgggcaactttacactgccgttggcgaaacaagcagccagtgtggtgggtgtagaaggtgttccggcgctggtggaaaaaggccagcagaatgcgcgacttaatggcttacagaatgtgacgttttatcacgaaaatcttgaagaagatgtcacaaagcagccgtgggcgaaaaacggcttcgataaagtgttgctggacccggcgcgagcaggtgccgcaggtgttatgcagcaaattataaaactggaacctattcgtatagtttatgtatcctgtaaccctgcaacgctggctcgggatagcgaagcgttattaaaagcaggatataccattgcgcgactggcgatgctggatatgttcccacacacgggacatctggaatcgatggtacttttctcgcgcgttaaatagttacgatttgccgatttcggcaggtctggtccctaaaggagaggacgatggttgcggtaagaagtgcacatatcaataaggctggtgaatttgatccggaaaaatggatcgcaagtctgggtattaccagccagaagtcgtgtgagtgcttagccgaaacctgggcgtattgtctgcagcagacgcaggggcatccggatgccagtctgttattgtggcgtggtgttgagatggtggagatcctctcgacattaagtatggacattgacacgctgcgggcggcgctgctgttccctctggctgatgccaacgtagtcagcgaagatgtgctgcgtgagagcgtcggtaagtcggttgttaaccttattcacggcgtgcgtgatatggcggcgatccgccagctgaaagcgacgcacactgattctgtttcctccgaacaggtcgataacgttcgccggatgttattggcgatggtcgatgattttcgctgcgtggtcatcaaactggcggagcgtatagctcatctgcgtgaagtaaaagatgcgccggaagatgaacgcgtactggcggcaaaagagtgcaccaatatctacgcgccgttggcgaaccgtcttgggattgggcaactgaaatgggagctggaagattactgcttccgttatctccacccgaccgaatacaaacgcatcgcaaaactgttgcatgaacgccgtctcgaccgcgaacactatatcgaagagtttgtcggtcatctgcgcgctgagatgaaagctgaaggcgttaaagctgaagtgtatggtcgtccgaaacacatctacagcatctggcgcaaaatgcagaaaaagaacctcgccttcgatgagctgtttgatgtgcgtgcggtacgtattgtcgccgagcgtttacaggattgttatgccgcactggggatagtgcacactcactatcgccacctgccggatgagtttgacgattacgtcgctaacccgaaaccaaacggttatcagtctattcataccgtggttctggggccgggtggaaaaaccgttgagatccaaatccgcaccaaacagatgcatgaagatgcagagttgggtgttgctgcgcactggaaatataaagagggcgcggcagctggcggcgcacgttcgggacatgaagaccggattgcctggctgcgtaaactgattgcgtggcaggaagagatggctgattccggcgaaatgctcgacgaagtacgtagtcaggtctttgacgaccgggtgtacgtctttacgccgaaaggtgatgtcgttgatttgcctgcgggatcaacgccgctggacttcgcttaccacatccacagtgatgtcggacaccgctgcatcggggcaaaaattggcgggcgcattgtgccgttcacctaccagctgcagatgggcgaccagattgaaattatcacccagaaacagccgaaccccagccgtgactggttaaacccaaacctcggttacgtcacaaccagccgtgggcgttcgaaaattcacgcctggttccgtaaacaggaccgtgacaaaaacattctggctgggcggcaaatccttgacgacgagctggaacatctggggatcagcctgaaagaagcagaaaaacatctgctgccgcgttacaacttcaatgatgtcgacgagttgctggcggcgattggtggcggggatatccgtctcaatcagatggtgaacttcctgcaatcgcaatttaataagccgagtgccgaagagcaggacgccgccgcgctgaagcaacttcagcaaaaaagctacacgccgcaaaaccgcagtaaagataacggtcgcgtggtagtcgaaggtgttggcaacctgatgcaccacatcgcgcgctgctgccagccgattcctggagatgagattgtcggcttcattacccaggggcgcggtatttcagtacaccgcgccgattgcgaacaactggcggaactgcgctcccatgcgccagaacgcattgttgacgcggtatggggtgagagctactccgccggatattcgctggtggtccgcgtggtagctaatgatcgtagtgggttgttacgtgatatcacgaccattctcgccaacgagaaggtgaacgtgcttggcgttgccagccgtagcgacaccaaacagcaactggcgaccatcgacatgaccattgagatttacaacctgcaagtgctggggcgcgtgctgggtaaactcaaccaggtgccggatgttatcgacgcgcgtcggttgcacgggagttaggccgaaatttgctcgtatctacaatgtagattgatatatactgtatctacatatgatagcggtttgaggaaagggttatgatccacagtagcgtaaagcgttggggaaattcaccggcggtgcggatcccggctacgttaatgcaggcgctcaatctgaatattgatgatgaagtgaagattgacctggtggatggcaaattaattattgagccagtgcgtaaagagcccgtatttacgcttgctgaactggtcaacgacatcacgccggaaaacctccacgagaatatcgactggggagagccgaaagataaggaagtctggtaatggtaagccgatacgtacccgatatgggcgatctgatttgggttgattttgacccgacaaaaggtagcgagcaagctggacatcgtccagctgttgtcctgagtcctttcatgtacaacaacaaaacaggtatgtgtctgtgtgttccttgtacaacgcaatcaaaaggatatccgttcgaagttgttttatccggtcaggaacgtgatggcgtagcgttagctgatcaggtaaaaagtatcgcctggcgggcaagaggagcaacgaagaaaggaacagttgccccagaggaattacaactcattaaagccaaaattaacgtactgattgggtagtgttactaactcacttctattctggtcacaggtttccacctgacagacccgcaattttcaggacaattcaatgaatcaaatcgaccgtttgctcactattatgcagcgcctgcgcgatccggaaaacggctgcccgtgggataaagagcagacatttgccaccattgcgccttacacccttgaagaaacctacgaagtgctggacgccatcgcccgtgaagattttgacgatcttcgcggtgaactgggcgatctgctattccaggtggtgttttacgcgcaaatggctcaggaagaagggcgctttgactttaatgatatttgcgctgctattagcgataaattagagcgtcgccatccgcatgtttttgctgatagttctgccgaaaacagtagtgaagtgcttgcccgttgggagcaaatcaaaaccgaagagcgcgcgcagaaagcgcagcattcggcgctggacgatattcctcgtagtttaccggctttaatgcgtgcgcaaaaaatccagaaacgttgcgccaacgttggcttcgattggacgacgcttggtccggtagtcgataaagtctacgaagagatcgacgaggtgatgtacgaagcgcggcaggctgttgtcgaccaggctaaactggaggaggaaatgggggacctgctgtttgccacggttaatctggctcgccatttagggacgaaagcagaaatcgcattgcaaaaagcgaacgaaaaattcgagcgtcgttttcgcgaagtggagcgtattgttgccgcgcgtggactggaaatgacaggtgttgacctcgaaacaatggaagaagtctggcaacaggtaaaacggcaggaaattgatctctaagggaattacgcggtcaagcgccatttgtgtcattttttaaatgacaagcgcttgatttgcgtcaaaaacatttaccccaaaggggctattttctcactcctgatttcaatagtgcgctggcgaagaggagggataatgaaagtttgtggcacaggtcatgttcgggtatactgctttcccgtcctggttattccatcgtcttttcaacctaacttctcaggttcagcatgacaacgaactatatttttgtgaccggcggggtcgtatcctctctgggtaaaggcattgccgcagcctccctcgcagccattcttgaagcccgtggcctcaatgtgaccatcatgaaactggatccgtacatcaacgtcgatccaggtactatgagcccaatccaacacggggaagtgttcgttactgaagacggcgctgaaaccgacctggacctggggcactacgagcgtttcattcgtaccaaaatgagccgccgcaacaacttcaccacgggtcgtatctactctgacgttctgcgtaaagaacgccgcggtgactacctcggcgcaaccgtgcaggttattccgcacatcactaacgcaatcaaagagcgcgtgctggaaggtggcgaaggtcatgacgtagtactggtagaaatcggcggtacagtaggtgatatcgaatccttgccgttcctcgaagcgattcgccagatggcagttgaaattggccgtgagcacactctgtttatgcacctgacgctggtgccgtacatggcagcgtctggtgaagtcaaaaccaaaccgactcagcactctgtaaaagagctgctctccatcggtatccagcctgacatcctgatttgtcgttcagatcgcgctgttccggcgaacgaacgtgcgaagattgcattgttctgtaatgttccggaaaaagcggttatttctctgaaagacgtcgattccatctataaaattccgggcctgttgaaatctcaggggctggacgattatatttgtaaacgattcagcttaaactgcccggaagcgaatctgtccgaatgggaacaggttatcttcgaagaagcgaacccggtaagtgaagtcaccatcggtatggtcggcaagtacattgaactgccggatgcttataaatcagtgatcgaagcactgaaacacggtgggctgaagaatcgtgtcagcgtcaacatcaaactgatcgattcacaagatgttgaaacgcgcggcgttgaaatccttaaaggtctggacgcaatcctcgtacctggcggtttcggctatcgtggcgtagaaggcatgattacgaccgcgcgttttgcgcgtgagaacaatattccttatctgggcatttgcctgggtatgcaggtggcgttaattgattacgctcgccatgttgccaacatggagaacgccaactctacggaatttgtgccagactgtaagtacccggttgtggcgctgattaccgagtggcgcgatgaaaacggcaacgttgaagttcgtagcgagaagagcgatctcggcggtaccatgcgtctcggcgcacagcagtgccagttggttgacgatagcctggttcgccagctgtacaatgcgccgacaattgttgagcgtcatcgtcaccgttacgaagtcaacaacatgctgttgaaacagattgaagatgcaggtctgcgcgttgcgggccgttccggggatgatcagttggtcgagatcatcgaagttccgaatcacccgtggttcgtggcttgccagttccatccggagtttacttctactccacgtgatggtcacccgctgtttgcaggctttgtgaaagccgccagcgagttccagaaacgtcaggcgaagtaagtaaaaaagttagagcggcaacgcgtaccctgggtacgcgttgtttgtctggagtttcagtttaactagtgacttgaggaaaacctaatgtccaaaatcgtaaaaatcatcggtcgtgaaatcatcgactcccgtggtaacccgactgttgaagccgaagtacatctggagggtggtttcgtcggtatggcagctgctccgtcaggtgcttctactggttcccgtgaagctctggaactgcgcgatggcgacaaatcccgtttcctgggtaaaggcgtaaccaaagctgttgctgcggtaaacggcccgatcgctcaggcgctgattggcaaagatgctaaagatcaggctggcattgacaagatcatgatcgacctggacggcaccgaaaacaaatccaaattcggcgcgaacgcaatcctggctgtatctctggctaacgccaaagctgctgcagctgctaaaggtatgccgctgtacgagcacatcgctgaactgaacggtactccgggcaaatactctatgccggttccgatgatgaacatcatcaacggtggtgagcacgctgacaacaacgttgatatccaggaattcatgattcagccggttggcgcgaaaactgtgaaagaagccatccgcatgggttctgaagttttccatcacctggcaaaagttctgaaagcgaaaggcatgaacactgctgttggtgacgaaggtggctatgcgccgaacctgggttccaacgctgaagctctggctgttatcgctgaagctgttaaagctgctggttatgaactgggcaaagacatcactttggcgatggactgcgcagcttctgaattctacaaagatggtaaatacgttctggctggcgaaggcaacaaagcgttcacctctgaagaattcactcacttcctggaagaactgaccaaacagtacccgatcgtttctatcgaagacggtctggacgaatctgactgggacggtttcgcataccagaccaaagttctgggcgacaaaatccagctggttggtgacgacctgttcgtaaccaacaccaagatcctgaaagaaggtatcgaaaaaggtatcgctaactccatcctgatcaaattcaaccagatcggttctctgaccgaaactctggctgcaatcaagatggcgaaagatgctggctacactgcagttatctctcaccgttctggcgaaactgaagacgctaccatcgctgacctggctgttggtactgctgcaggccagatcaaaactggttctatgagccgttctgaccgtgttgctaaatacaaccagctgattcgtatcgaagaagctctgggcgaaaaagcaccgtacaacggtcgtaaagagatcaaaggccaggcataagactgactttatctgatttaaaaatgccagcctccgggctggcattttttatggttgagttaccagcggccggatgcgccgccacctccagaagaaccgcccccgccgctaaatccgccgctatctgagcctccagcggaaccgctgttgtctgaatgataacttctaccagatgctcttttctgaagtacacataaacaggtaaagaccataaatatggtgaaagtaaaaaagaaggaaaatacagcaatggaaaaaattttatcggagaacaggaataaatctaaaagatagattgctgaaatacagactccacttttacatgcgcgacaaaaattactgccttgatgaaaaaaccagaaagggaagaacatcactgcaaatacccaaaaaatagcaaagtaataatgatcactggaagacgctgattcactttctgaaggattagtcggatattggtgttgtgaagtgagttggttattcaaagcgtttatagctagctctaatcccttagctaatttttgttgtttaaatgcgggtatcatgttgctacggatgatatctccagccagagcatcggttaccttttcttccagcccataacctacctggatgcggacagtgcgatccgaccaggcaacaacgatcagtatcccatcattacgtttggcatctcctaaacgccaattgtcaaaaactcttgtagcatattgttcaattgtctcgtctttggttgtgggaacaattaatacggcaatttgcacttgggtattattgaaaatagattctaacttgtgcgtcagttctttcttttcttgtgagtttaagctactcgtaagatccgtaacttgttgctgtaattgtgggacaatagttggttgggctgcaacaaaggaacatacgaaagtgaacattagtatgaaatagcgcattataaatttctcattaaatctggataaataaattgacggcggcatcggtaattttatattcgttatcattaaaaactaatacagaaaaaataaatataattttggtgaatgttttgacatgattaaatccattttctttattttcttctgacataatacgttactccctttaattattaacgatatgtttcgcatttttctttaaacctgcctgtaacagaatgttaataagacatgattgttgtggcaggatctgcaataattaacaattatccacttcacagagaatgctatgcagtacccgattaacgagatgttccagaccctgcaaggtgagggttactttaccggcgttcccgccatttttattcgtttacagggatgcccggttggctgtgcctggtgcgacaccaaacacacctgggaaaagcttgaggatcgggaagtctcccttttcagcattctggcgaagaccaaagagagtgataagtggggggctgcgagcagtgaagatttgctggctgtcattggtcgccagggatacaccgcgcggcatgtggtgattacgggtggtgagccttgcattcatgatttgctgccactgactgatctgctcgaaaagaacggttttagctgccagatcgaaaccagtggtactcatgaggtacgctgcacaccgaatacctgggttaccgtatcgccaaagctgaacatgcgcggcggctatgaagtgttgtcacaggcactggagcgagccaacgaaatcaagcatccagtggggcgcgtacgcgatattgaagcactggatgaactactggcaacgctgaccgatgataaaccgcgagtcattgcactgcagccgattagccaaaaggatgatgccacacgtttgtgcattgaaacctgcattgcgcgtaattggcgtttgtcgatgcaaacacataaatatctaaatattgcctgattaaacatttataagcgttataaatgggtggaacctgtaaagacttctactcatttatattgtttgtcgcctctgaaaactcctccattttacccatccagggctaatcattagcattctctacaaattctgtggcattaatttttcgctggagtgaaaattattgcggtaaagtttggtagattttagtttgtatagagttattttaaacatttacctttttaatcaatggattaagtgctctttaacataatggatgtgttgtttgtgtgatactataaagttggtagattgtgactggcttaaaaaatcattaattaataataggttatgtttagagtgttccccgcgccagcggggataaaccggcaaaaaccgggcaatcgcaaaaaggcgtaatgtgttccccgcgccagcggggataaacctgtgtttgcggcattaacgctcaccagcatttcgtgttccccgcgccagcggggataaaccggagcctgacgagactactgaggccgttctgtcgagttccccgcgccagcggggataaaccaccatataacccgttatctctttctcaagtttttatattagcagtacttgtaataagcaacatatccacgtaacacctcatgttcaaaatagttctccatgccagagaggttcacaattatcgatacaaaaaattaaatttaatcaaagtgttatttgtatgattcttaaatcgttaagaaattttaatctattatttttttaatattgaattaatgcctgttaattttttctttagaatgacagtatattttttaagcttgttattcattggttaagtaataaatctggaagtttgtctttgttttgaggctaatgagtggttttacataaccgcctctatacgctgttgatgaatagttcttatgaataaagatatccagttcatactttaagtgaaaattgataaagtgcgattcgtattgtcttttattctaaagacatcgagtgtagttaatattccttgtaaaaacagggataaaccgaactagttaaagtttttattatgttccctgcatcagcggggataaaccggacttgttatcattttttaagttgtcgaacttatgttccccgcgtcagcggggataaccattcaggtatgttcaggccgggcagtttcccgcccggccttcctcacttacgcattcgaccagctctggatcgaatccacattccccaattccccatgcatcacttcatacgattttttcaggatcacatcagtatgtttggttaggtctttgaaaatgcctttattcatcgcgtcgtagcgtttggcattgctctcaatcggtataaagatatctttcacgcgaaccatgttatcgacagccgttgcgtaatccgggtatagccccagacctaccgctgtattaatcgctgcccccaggcttgcacaaccgttaatggcgttacgtcgtgccggaaggttgaacacgtcggcaaaaatctgcataaacagatcgctgttcgaaccgccgccagtaatgatcacatgcttcgcaaagtgattcatttcattacacatattgtcgtaattgttcttcagcgtcagcgccacgctttccagtatcgaacgatatatccatgcgtaatccatgctggaatcaaagccgatcataatcccgcgtttgtacggttcccacggattggtcagccagtccagcaccgtcatcagaccattacagcctggcggcacacaagaagcttttttgttgagtaaatcttccggtgaaagatcctgcgccctggcatcctgaattaacgactcgcctagcatgtcgcgcagccagctcaccgtccacatgcctttgcgaataccgtaaccttcatacagcaatgtttgcggaatagaagacataatcggccagtacgctactggatctttcggcagtgctttgccgttcatcatcaatgcgatgtaagtgccaagagaaattaccgccgtttcatcatccagtaatccggcccccagagcttctaccggtttatcactggtggtacaaacaaccggcagtcctgccgggaaatgtgtcgccagtgcggcttgtggtgtgatatgtccgaggacggtgccaggcatttgcacatcaaacagcatatgacgggggatattaaacttatccattaccgcagcatcttcgctccatgcccagctcttataatccaccggccactgaccaaaatagttggcgatattgtctttaaactcgccggttaagcgatgcgtcagataacccgaaaaagaggtgacatatgccacgtcagggttagtgtgttcgtaagggcgtgtaacgcgtgcatcctgccagctaatcaacggcgcagcaggcgtgccatcggctttcaataacgcacggcagcaacggatggatcccagaccaataccgacaatatcttctttattcccggcaaactgactcatcaaatcgtgaccggcaaaacataatgatgcccataaatcgtcgtcaggatgttctgcagtatcggcatctggcgtgtgcatcggctgtaataagcctttgccttcgcaaaccacgttaccttccagatcgtacatcaccacttttgtgctctgacttccgccatcaatccctatgatgtattttttcgacatgatttttctcctgtaattttcctggcttacttgctgctagccattgcgggggcgctatcagcagtacgaattttttggaacagcaaaaaggtaaagacaatcaccatgccaagcgccgccatgcccatcagccacatattgcggtaggcttctgcagcgggcagggtgtcttgccagtggccgataattgggtaaacgaagacatccggcaggaatccaatcaccgaacaaatacctaccgtggtgcccataatgtaagacggtgttctcgcttcgccagggcaggcccagtacagcccgcgtgaggcgtaacaggtgaatcccagcagtaaaatcaggccaatccccatcgcgaccgattgcgggttagagttcgtgacgagcagggcagttaacgtcagcaggccgagtacggaaaggatttggatcacgcgggtaggggatttcactttgctgtaggtggtgattatgccgccaagtgggccgcacagcgcgcggaatattttgttgatcacaatccccatgtagctcgccgccaccagcgacatgccatacatttcggtcagatagttggtggagtaactcagaatggcgtagatggtgaagacgccaaaaatcaccatgctgcaataccaggtggtgctgatacgcaaaacggccaggatgtcgctaagctggaatgactgtttttcttcgttattggcactgcgcaggttgttgttatcgctaacaaaaaaccagcacagaatccccaacaagatgtaaaccacactatagatgataatgaccgttttcaggctggtgctgtcatccggtgcaaagcgagaaaagacccacatggtaaacaccgccagcgacattacaccgacgccgcgcagcccttccatccagcccataattttcccttgctcgctatgatcgccaagcaacgatgcagctttaatcgacaccgaccacagcattaaaatcgtcgttatcgcaaaggcgatctgaatacagagcattacccacagcggtggatacgttgccattaacagacccagtaatccggtaatgatcatcgcggaagtaatcattttgcggtgtgaaaatttatcggcaataacgccgctgggggcataaagaataatggccgcaataccaaaggtactcattattaaacctatctcggtattgctgaatcccataaatttcgccatgggaatttgataaatataacgtaaataagccaggtcgaaactaacgccgccgctaaaactaattatcgcgagggttatccaacggcgatatgagttgtgttgcatatcgtattcccatttgtaatagataaaaaaaagagaaaagtaagccgccctttcaggtggattacttttctcaggtctctagtaattgaaataataaataacatggaaagcagaggtgttgtgtgagagtaatcacgcttctgctttttaaaattatttgacaatacgaatatcacactgtgattacgatcacattagcagttatgcccttatgctaaaaattatctccagttaccagagataatgagaaaggtaacttccctctcgcgggggaagttacctttctttttttttgccttacggaaattggagctaactatgtcaatcgaatctctcaatgcgttctcaatggattttttctccctgaaaggtaaaaccgcaattgttaccggtgggaatagcggtttaggccaggcatttgccatggcgttggccaaagctggcgcaaatatctttattcctagtttcgtcaaagataacggcgaaacaaaggaaatgattgaaaaacagggtgttgaggtggacttcatgcaggtggatatcaccgcagaaggcgcgccgcagaagattatcgctgcttgctgtgagcgtttcggtacagttgatattctggttaacaatgccggtatttgtaagctgaataaggtgctggacttcggtcgtgccgactgggatccgatgattgatgtgaacctgaccgccgcattcgagttaagctatgaagctgcaaaaattatgatcccgcagaaaagcggcaaaattattaatatctgttcattgttctcttacttaggtggacaatggtcacctgcatattctgccactaaacatgctcttgccgggttcaccaaagcttattgtgatgaactaggtcaatataatattcaggtaaatggtatcgcccctggctattatgcaacagatattacgctggcgacacgcagtaatccagaaaccaatcagcgcgttcttgattatattccggcaaaccgttggggcgatactcaggatttaatgggcgcagccgtattcctcgcaagtccggcatcgaattatgtcaacgggcatttattagtggttgatggcggttatttagtgcgctaacccataacggtggtttctgttttctcttattaatgattattccatttttattatcaggaaggaattactatgtctttatctcgcgcagcgattgtcgaccagctaaaggaaattgttggtgcagatcgcgtaattaccgatgaaacagtattaaagaaaaacagtattgaccgttttcgtaaatttccggatattcatggcatttatactttgccgattccggcagcggtcgtaaaactcggttccacagagcaagtatcccgtgtgctgaattttatgaatgcgcacaaaattaacggtgtgccgcgtaccggtgcttccgccaccgaaggtgggctggaaactgttgtagaaaactcggtggtgctcgacggctccgccatgaatcaaatcattaatattgatattgagaatatgcaggcgacggcgcaatgtggtgttccgctggaagtgctggaaaacgcgttgcgtgaaaaaggttacaccacggggcattctccgcagtcaaagccgctggcgcagatgggcggcctggtagcaacccgaagtatcgggcagttctccacactctacggcgcaatcgaagatatggtcgttggtctggaagcagtattggctgatggcaccgtcacacgcattaaaaacgtgccacgccgcgcggctggcccggacattcgtcacatcatcatcggcaacgaaggtgcattgtgctatatcactgaagtaacagtgaaaatctttaaattcaccccggaaaacaacctcttctacggctatatcctggaagacatgaaaaccggcttcaacatcctgcgtgaaatcatggtggaagggtatcgtccgtcaatcgctcgtttgtatgacgctgaagatggcacccaacacttcacgcattttgccgacggaaaatgcgtgctgatctttatggctgaaggtaaccctcgcattgcgaaggtgacgggcgaagggattgcggaaatcgttgcccgctacccgcaatgccagcgcgtggacagcaagctgatcgaaacctggtttaacaacctgaactggggaccggataaagtggctgccgaacgtgtgcagatcctcaaaaccggcaacatgggctttaccaccgaagtatccggctgctggagctgcatccacgaaatctacgaaagcgttattaaccgtattcgtactgagttcccgcacgccgacgacatcaccatgctgggcggtcattcctctcatagctatcagaacggcaccaacatgtacttcgtctacgattacaacgtcgttgactgtaagccggaagaggaaatcgacaagtaccacaatccgctcaacaagatcatctgtgaagaaaccattcgcctcggcggttcgatggtgcaccaccacggtatcggtaaacatcgcgttcactggagcaaactggaacacggcagcgcgtgggcgttgctggaagggctgaaaaagcagttcgatcctaatggcattatgaatacgggtactatctatccgattgaaaaataatgtgtcaggcagcgttccgcgatgacggggcgttgccttttcggcttctcaggcgagaagccgttcttattaccggacaatgaaggggtaaagatgaacacttcaccggtgcgaatggatgatttaccgcttaaccgttttcactgccgcattgctgcgctcactttcggcgcacacctgaccgacggttatgttctcggcgtcattggttacgccattattcagcttacgcccgccatgcaactgacgccgtttatggcgggaatgatcggcggctcggcgctccttggtttgttccttggcagcctggttcttgggtggatctccgaccatattggtcggcaaaaaatcttcaccttcagctttttgctgattacgcttgcttcgtttttacaattttttgccaccacgccagagcatcttattggactgcgcattttgattggcattggtctgggaggcgattattcagtaggtcacaccttgctggctgaattttccccgcgccgccatcgcggtattttgctgggcgcattcagcgtggtgtggaccgtaggctatgtgctggcaagtattgccggacatcactttatttccgaaaacccggaggcctggcgctggctactggcatcggcagctctgcccgcgttgttgattacgttattacgctggggaacgccagaatcaccacgctggctactgcgccaggggcgttttgcagaagctcacgctatcgtgcatcgctattttggtccccatgttttactgggcgatgaagtggtaacggcgacccataaacacatcaaaaccttgttctcttcgcgttactggcggcgcacggcgtttaacagcgtcttctttgtctgcctcgtaatcccatggtttgtgatttatacctggctgccaactatcgcccagactattggtctggaagatgcgctgactgccagcctgatgcttaatgcgttgttaattgtgggcgcgctgctgggattagttctgacgcacctgctggcacatcgcaaatttttgctgggaagttttttgctgctggcggcaacgctggtagtcatggcctgtttgccttccggcagttcattaacgctgctgctttttgttctcttcagcaccaccatttcggcagtcagtaatctggtgggcattttgcctgcggaaagttttcctactgacattcgctcgctgggcgtcggttttgccactgccatgagtcgacttggcgcggcggtaagtactggcctgctgccgtgggtgctggcgcagtggggaatgcaagtcaccttattgctcctggcgacagtgttgttggttggttttgttgtgacctggctatgggcaccagaaactaaagccctcccgctggtggcggcgggaaatgtaggaggtgcgaatgaacattctgttagcgtttaaagccgaaccggatgccggaatgctggcggaaaaagagtggcaggcggcggctcagggtaaaagcggaccggatatttcgctactgcgaagtttactcggtgctgatgaacaggccgctgccgcgctgctgttggcgcagagaaaaaacggtacgccgatgtctttaaccgcgttgagcatgggggatgaacgggcattgcactggctgcgctatctcatggctcttgggtttgaggaagctgtattgctggagacggcggcagatctgcgctttgcgccggaatttgtcgctcgccatattgccgaatggcagcatcagaatccgctggatctgataattaccggctgccaaagcagcgaagggcagaatgggcaaacgccatttttgctggcggaaatgctgggctggccctgcttcacccaggtggagcgtttcactctcgacgcgctgtttatcaccctcgaacagcgtactgaacatgggttgcgttgttgccgggttcgcttgcctgcggtgattgccgtgcgtcagtgcggtgaagtggccttgccagtaccgggaatgcgccagcgaatggctgcggggaaagcagaaattatccgtaaaactgttgctgccgaaatgccagcgatgcagtgtctgcaactggcaagagcagagcaacgacgcggagcgacgctgattgatgggcaaacggtagcagaaaaagctcaaaagctatggcaggactatttacgccaaaggatgcagccatgaatatcgcaattgtgacaataaatcaggagaatgccgcaatagcaagctggctggcggcgcaggatttcagcggttgtaccctggcgcactggcagattgaacctcagcctgtagtggcggaacaggtgctggatgcgttggtggaacagtggcagcgaacgcctgcggacgttgttctctttccgccgggaacgtttggcgatgaactgtcgacccggctggcctggcgtttacatggtgcaagcatctgccaggtgacttcgttagatattccaaccgtaagcgtgcgcaaatcccactggggaaatgcgctaacggcgacgctgcaaacagaaaaacgcccgctatgcctttccctggcgcgtcaggcgggagcagcgaaaaacgccacgttgccctctggaatgcaacaactgaacattgtcccgggtgcgcttccggactggctggttagcacagaggatctgaaaaatgttacccgcgacccattagctgaggccagacgggtgctggtggtggggcagggcggagaggcagataaccaggaaatcgctatgctggcagaaaagctgggagccgaagtgggctacagtcgggcgcgagtgatgaacggtggcgttgatgctgaaaaagtgattggtatttccggacatctgctggcacctgaggtgtgtattgttgttggcgcttctggcgcagcagcgttaatggcgggcgtacgcaatagcaagtttgtggtggcgattaatcatgacgccagcgctgcggtattttcacaggcagatgttggcgtggttgatgactggaaagtggtgctggaggcactggtgacaaacattcacgcagattgccaataacgtgttgccggatgatcctgcctacggttctggcctggggacttgtaggcctgataagacgcgtcaagcgtcgcatcaggcgctgaatgtcggatgtggcgtgcggcctacaaatcaaaccaaattcaattggttacgattatcccgtcaaagtaattttttcgctaacgtccagaccccggtattcgtggtggaaagcgccacgacacccgcgttaatcgcattacgcgcatcttcttcatcgcacaccagcccaccggcaatcagcggttggcggattttctctgtcacccagcccagcactttgggcatacagcctggcaggatctcaatacaatccggattcgattgcgcaacttgcttatcaatgttgtgaaacgaaattgaatcaacaataaacaggcgatgaatacagaaaaaaccttccgctcttgccgctttcaacattgaggctttggtactgataatgccgtccgcctcggtcaccagtttcaaaaactgaataacgacttctttatttgacgcgccttccagcaaatcaacatgaataaaagcatatttcccggcgttcttaatctttttaacgatattactgatggtgcagatattgccgtacaacacggaaataaattggcattcagaatcgattgccagttgcaggctggcattatctttaacggcagcaatcaccggattctggcggagcaggtgtaagaggggcataaattatccttattatttatccaaagcggtaggtgatgccgaatccggaaggcggatagcgccactgttgtagtgttgattcgtcgcacagcaaacggcaggtgccacactccaggcaactgcgatagtcaatacgtaagttaccttccggtgtgagcgaaaaaagacctgccggacaggcgttaatcaaccgttctgccgtctggcgctcaacggagtcagccggaacaatgtgcggcgcatcagcaacgcgccagagattacgggctacagacatcgcagactcctgataacatcgcccgccagatgccacaggccgtgacgacgtaaatgatgccagaataactggcgcagcggtggaacaggtttatcaccctgatcccataaatcgcgggaaatatcctgcattaacgcaggccacgtacggtaccatcccgggcgttgcaaaagcgccggaacatgctgataacgctgtagaacatcccacagcaggctgcgctctacgttgtgatgataaagcggaaacagattttgcggctcgcggtgctggcaggcgcttatcagcgtttgtgccgccgcctgcgcgccagtcagcgccatatccatgccgcgcacggaaattccggtattgacgcaactgcgcaacgcatcgcccaccagcagccagccgttaccggcgtattgcaccggcatactgtgcaagccaccttctggcaccagatgcgcaccatactccagtgattccgtgtttttgataagcgggcgcactgccggatgcgctttaaagcgagtcagcagctcgcttgccggaacacgactttgcgtaagggaagagagcgggcaaacaatccctaacgagagcgtttgttgattagtataaagaaatgcgccgccgggtaagtcatcacagatcctgccgctgaacagcaacgctgcgccttcgttattctccagatgaaaacgttcttcaatagcggatgtttccagcgacagcacttctttgatccccaacgccatcgcttcgccagcaggacgagtcactaacccgtgacgttcagccaggacgctgttggcaccttctgccagcaccacataacgggcgcggagaatatcgtcaccacaaataacgccacagactctgccgttttcttcatacagtgcatccaccgtcgctccggggatgcattcgacaccttctttttcggcttcggcaaccagccacggatcgaatcgtgcacgtaatacactccaggattcaccgccgggctgtaagctggaaaacgtcgttacgccatcgggcgttaacagggaaaggctttcgtgagtgatgcgtcgttcaagaggcgcggtcagatgaaattgcgggaggagttccgcgagtgcatgggtatataaccgcccgccggaaagatttttgctgccggggatttcagcgcgttccagtaacaaaacggataaacccgctcgcgcgcagcgtaacgcgcaagcggtgcctgcaataccggcaccaataataataatgtcgcagtcgtcttccatgtcatgccccagatatccagaacacaacaccctaacatagcgttacttaagggaaattgaccgccgacacactcttatcattcgccgcgatagatacaacctgcggtgcaggtttcttttaccatcaccgcacttaacagcggcacaacgggtttaacctgatcccaaatccattttgcaaaaacctcgctggttgggttttccagacctggaatatcattgagataatggtgatcgaggcgctcgtaggttggtttaaacgccgcttttagttcagcgaaatcgataatccagcccgtatgcggatcgacttccccggtaatttccagtcgcaccataaaggaatgcccgtgcaggcgaccacatttatgcccttccgggacgtgtggtaagcggtgagcggcttcgaaggtgaaatctttaaataacgtggtggacatcataatttctctacaggacgataaaaccgccgtagagtaccggaaaggctgttttttcgcattatctaaaacgactttgttgcgcaaaatcgctgatttatcttaatgattggctaaattcatttgtttttcattaggttggttaatctattttgttgttaaagactattgctaaaacaggttagtcgatttggttattagttatcgctatcccgtctttaatccacaccgtttgccccgttaaccttaccttctcttctgttttatgggcgctgacagggcgcagaaacagctttgcttactggaacataacgacgcatgacgacacaggtcccaccttccgcgttgcttccgttgaacccggagcaactggcacgccttcaggcggccacgaccgatttaactcccacccagcttgcctgggtttctggctatttctggggcgtactcaatcagcagcctgctgcgcttgcagcgacgccagcgccagccgcagaaatgccgggtataactattatctccgcctcgcaaaccggcaatgcgcgccgggttgctgaagcattacgtgatgatttattagcagcaaaactgaacgttaagctggtgaacgcgggcgactataaattcaaacaaatcgccagcgaaaaactgctcatcgtagtgacgtcaacgcaaggggaaggggaaccgccggaagaagccgtcgcgctgcataagttcctgttctccaaaaaagcgccaaagctggaaaacaccgcgtttgccgtgtttagcctcggcgatagctcttatgaatttttctgccagtccgggaaagatttcgacagcaagctggcggaactgggtggtgaacgcctgctcgaccgtgtcgatgccgatgttgaataccaggctgctgccagcgagtggcgcgcccgcgtggttgatgcgcttaaatcgcgtgcgcctgtcgcggcaccttcgcaatccgtcgctactggcgcggtaaatgaaatccacaccagcccgtacagcaaagacgcgccgctggtggctagcctctctgttaaccagaaaattaccgggcgtaactctgaaaaagacgttcgccatatcgaaattgacttaggtgactcgggcctgcgttaccagccgggtgacgcgctgggcgtctggtatcagaacgatccggcactggtgaaagaacttgtcgaactgctgtggctgaaaggcgatgaacctgtcaccgtcgagggcaaaacgttgcctctgaacgaagcgctacagtggcacttcgaactgaccgtcaacaccgccaacattgttgagaattacgccacgcttacccgcagtgaaacactgctgccgctggtgggcgataaagcgaagttacagcattacgccgcgacgacgccgattgttgacatggtgcgtttctccccggcacagcttgatgccgaagcgctaattaatctgctgcgcccgctgacgccgcgtctctattccattgcctcctcgcaggcggaagtcgagaacgaagtacacgtcaccgttggtgtggtgcgttacgacgtggaaggccgcgcccgtgccggtggtgcctccagcttcctcgctgaccgcgtggaagaagagggcgaagtccgcgtatttatcgaacataacgataacttccgcctgccagccaatccagaaaccccggtgattatgattggcccaggcaccggcatcgcgccgttccgcgcctttatgcagcaacgtgctgccgatgaagcgccgggaaaaaactggctgttctttggcaacccgcactttacggaagatttcctctaccaggtggagtggcagcgctacgtcaaagagggtgtgctgacgcggatcgatctcgcctggtcgcgcgaccaaaaagaaaaagtttacgtacaagacaaactgcgcgaacagggcgcggagctgtggcgctggatcaatgacggtgcccacatttatgtctgcggtgacgctaatcgcatggcgaaagacgttgagcaggcacttctggaagtgattgccgaatttggtggcatggacaccgaagcggcggatgaatttttaagtgagctgcgcgtagagcgccgttatcagcgagatgtctactaatgagcgaaaaacatccagggcctttagtggtcgaaggaaaactgacagacgccgagcgcatgaagcttgaaagcaactacctgcgcggcaccattgcggaagatttaaacgacggtctgaccggcggctttaagggcgacaacttcctgctgatccgcttccacggcatgtatcagcaggatgaccgcgacatccgcgccgaacgtgctgaacagaagctggagccgcgccacgcgatgctgttgcgctgccgtctgccgggtggggtgattaccactaaacagtggcaggcgatagacaaatttgccggtgaaaacaccatctatggcagcattcgcctgaccaaccgccagacgtttcagttccacggcattctgaaaaagaacgtcaaaccggtgcaccagatgctgcactcggttggtcttgatgcgctggcgaccgctaacgacatgaaccgtaacgtactctgcacctcgaacccttacgagtcgcagctacacgcggaagcgtacgagtgggcgaagaagatttctgagcatctgctgccgcgtacccgcgcgtatgcggagatctggctcgaccaggaaaaagtcgccactactgatgaagaaccgatcctcggccagacctacctgccgcgtaaattcaaaaccacggtagtgatcccgccacagaacgatatcgatctgcacgccaacgacatgaacttcgtggcgatcgccgaaaacggcaagctggtgggctttaacctgttggtgggcggtgggctttccatcgaacacggcaacaagaaaacctacgcccgcaccgcgagtgagtttggctatctgccgctggagcatacgctggcggtggccgaagccgtcgtgacaactcagcgtgactggggtaaccgaaccgatcgtaaaaatgccaaaaccaaatacacgctggagcgcgtgggggttgagacgtttaaagcggaagtggagcgtcgcgcggggatcaaatttgaaccgatccgtccatatgagttcaccggacgaggcgatcgtattggctgggttaagggcattgatgataactggcacctgacgctgtttatcgaaaatggtcgcatccttgattatccggcgcgtccgctgaaaaccggcctgctggagatcgcgaagatccacaaaggcgatttccgcattacggcgaaccagaatctgatcatcgccggtgtaccggaaagcgagaaagcgaagatcgagaagatcgccaaagagagcgggttaatgaatgccgtcacgccgcagcgtgaaaactcaatggcctgcgtgtcattcccgacttgcccgctggcgatggcggaagcggagcgtttcctgccgtcttttatcgacaacatcgataatttaatggcgaaacatggtgtcagcgatgagcatatcgtgatgcgtgtaacaggctgcccgaacggttgtggtcgcgcgatgctggcggaagtgggcctggtgggtaaagcgccgggtcgctacaacctgcatcttggcggcaaccgcattgggacacgtatccctcggatgtataaagaaaacatcaccgagccggaaatcctggcgtcgcttgatgaactgatagggcgctgggcgaaagagcgcgaagcgggtgaaggcttcggcgactttacggtgcgtgcgggcatcattcgcccggtgctcgatccggcgcgcgatttgtgggattaaccatcagcccggtcttgtaggcctgataagacgcgtgagcgtcgcatcaggcaaggcaaacagtgaggaatctatgtccaaactcgatctaaacgccctgaacgaactgccgaaggtagatcgcattctggcgctggcggaaactaacgcccaactggaaaaactggacgctgaaggccgcgtagcctgggcgctggataatctgcccggtgaatatgtgctttcttccagcttcggcattcaggcggcggtgagcctgcatctggtgaatcagattcggccggatattccagtgatcctcaccgataccggttatctgtttccggaaacctaccgctttattgacgagttaacggacaaactcaagctcaacctgaaagtgtaccgtgctaccgaaagcgccgcctggcaggaagcacgctacggcaaactgtgggaacagggcgttgaaggcattgaaaagtacaatgacatcaacaaagtcgaaccgatgaaccgggcgctgaaagaacttaacgcgcaaacctggtttgctggcctgcgccgcgaacaatccggcagccgcgccaatttaccggtgctggcaattcagcgtggcgtatttaaagtgctgccgattatcgactgggataaccgaactatttatcagtacctgcaaaaacatggcctgaaatatcacccattatgggatgaaggatatttatcggtcggtgatacccatacaacccgtaaatgggaacctggcatgtcggaagaagaaacacgtttctttggcttaaaaagggaatgtggattgcacgaagggtaaatattgccggataaattaaacgcctctgtcagaaatgatgggggcgtttttattttgcgagcagtattcctgattttaaacgtgaacgccgctggaagaattatcaggtatagaatggcgtcgggtgcttgaggctgtctggcgttaagcattcgcgaggttccagatggacaaaagccccaggcgatatttctatcaacctgaggcttacgttcgaacccaaacaattcgaatgttagtctcttctttgcagggaggcaagacatgctgacaaaatatgcccttgtggcaatcatagtgctgtgttttacagtactgggattcacgctgatggtaggcgactcgttgtgtgagttgagtatcagagaacgtggtatggagtttaaggcagttctcgcttacgaatcgaagaagtagccaccacgcgggggtaaaacccataagcgctaacttaagggttgaaccatctgaagaatgcgacgcctcggtgccctgcatcagggcataaccagacggaacggtatctgatggccacgggattggtgcgccgactgggtagctttctggtggaagatttttcgaggtataaacttctgcccagtcttcctcaaaaccataaccgtctcttgaagaacggtagaacagaccaccatttctgtaatgcgccttcatctgcagggtccggcaacttccgactccggtatagaagttaaccagaatatagctgtcgccagagcgggtgacattgtaagcacctgattcggcattccagggaatagtccctggctggagatctgtctcgctggcctgccgcagttcttcaacttcccggcgcagcttttcgttctcaatttcagcatccctttcggcataccatcttataacggcggcagagtcataaagcacctcattacccttgccaccgcctcgcagaacgggcattccctgttcctgccagttctgaatggtacggatactcgcaccgaaaatgtcagccagctgctttttgttgacttccattgctcattccacggacaaaaacagagaaaggaaacgacagaggccaaaaagctcgctttcagcacctgtcgtttcctttcttttcagggggtattttaaataaaaacattaagttacgacgaagaagaacggaaacaccttaaaccggaaaattttcataaatagcgaaaacccgcgaggtcgccgccccgtaacctgtcggatcaccggaaaggacccgtaaagtgataatgattatcatctacatatcacaacgtgcgtggaggccatcaaaccacgtcaaataatcaattatgacgcaggtatcgtattaattgatctgcatcaacttaacgtaaaaacaacttcagacaatacaaatcagcgacactgaatacggggcaacctcatgtcaacgaagaacagaacccgcagaacaacaacccgcaacatccgctttcctaaccaaatgattgaacaaattaacatcgctcttgagcaaaaagggtccgggaatttctcagcctgggtcattgaagcctgccgccggagactgtgctcagaaaaaagagtttcttctgaagcaaacaaagaaaagagtgacattactgaattgctcagaaaacaggtcagaccagattgaagcaatttagataatcgtgcagactacgccccctcatatcacatggaaggtttatctatggatcaggtagtcatttttaaacaaatatttgataaagttcgaaacgatttaaactatcaatggttttattctgagctaaaacgtcacaatgtctcacattacatttactatttagccacagagaatgttcatattgtattaaaaaatgataatacagtgttattaaagggcctaaaaaacattgtgtctgtcaaattttcaaaggataggcatcttatagaaacgacctctaataagctgaaatccagagagatcacatttcaggaatacagaagaaaccttgctaaagcaggagtttttcggtgggttacaaatatccacgaacaaaaaagatattactatacctttgataattcattactatttactgaaagcatccagaaaactacacagatcttaccacgctaaaccataacgtccggcttctctcactcctgagccggactgcattggtttaataaaaaccatcaacaattgtgatttagatattcggaaccattcaaatataacaaaaccccgtaaaaacgaggtttatggataaattttattattgaatacatcagattaaattaatcttgacatcatagctttcaagacccgtcattttttcccgtgcggtaaactgaatactggtaacttctttcccggtctttttcttaagttcaataattttttttgttatatattcagaaatatctgcttctgcttttgtttttaagttttcaatattcatcatttcctcttttagtctgttatgactttccagttacacagtaagtcgattatatggtgcaaacgtgtaaaagataagatgaaacatcgcaataatcaacatacgatagtctaaattttacacaaacagacaaagagaattttcctgaattatcaatgcaatagcatcaaatcaactcaagagccttattgctgcttccagaatttcttctgaagtaacatgtcgatccgcggctacataaatgactttatgatctccggtcagagatggaaaccctgcggccattacagtaaggtgtgttttttcgccatttggatattcacgcatgatggtgttaactccagtcatcgctggcactaccactgctggttcagagttaaaaaaaactatgatttttttcatgatgttaccgtagtatgtgagtatccatcgaatagacaccaagcaaaaaagctcccgaaggagccttcattttcacttttttaaatccaacgacagacggctggcatttaagtattgtgaaatattatcaaatgtaatcatcattgatttacaaaagatacattttgccccgaaaggattcatgtcagaaacatcaaaagatgatgttctatactgggaaccatgacaacacgggcatctaaagtgaatatggtttgtaatattgtctacctcaaagcgccactacatgaacagcggcaggacctttaggtccgttctcaataccaaattcaacttcctgattctcagttaatgttttgaaatcgttgctctgaattgctgagaaatggacaaacacatctttgctgccatctttcggcgtgatgaaaccaaaacctttttcagggttaaaccatttcactaaaccagtcattttgttagacataattattaccttttgaagaaattagcccttgggcagaatggtccgaaaaaaaatatcagagagaaaaaccaacaaggaaatctcaagaggtacaaataataaaattataacaatgactgcttcagataaatttgtaacaaaccagaacaccattaacgcatgattaaccacccatagcaaggattacttttgtaaagaaaaacacagcaatgaaagaatagctttatttattaataaaacgtgtcattctgattaagaccttttatcttacccttaagatttcaggaattttggctcatggaagagtcctttttatttaaattttacattccgcgatgtaaatgttccgatttaatattaccctacatttgatgctttttatctcttaaagattcatagatctgttgacaagtcactcctgcgatgtagcgttcgtcagcaatttcagcataaagctgagcttctgctgcaatatctccgagcatgttggtgagcattccttcggcggttttggttgttttgcctctgacggcagcggcaagatctgcggtatgcttcgctgcgtcaaggcgtatggcatatttttttgcttcggcacgcaactggttaacactatcagacagataagcagccctggcagaaatttcagcagatttctgttgcgcatctttaacagcctcatcacgggctatagttcgcccctgttcaattattcgagcagcaaattgagcatttacctcttgtgataatgcggcagcatcacgttccgcccattttttttgccatcctcggtcgctccagacatttccgacgataaatcctgacaacacgagaaaaatcaccatgaatatctgattcactgttctatcccccagcaggttaatgcgctctcctggtcacgacgaataacctgaccgtaacagttatttgaacgaatgcggcaatcgcgtccgccatccttaatccaccagcgaatcgcttcgcatgcacctttacgatcaccagcattcagccgcttataaaacgtcgacgggaaacacttaccggggccaatgttatagggacaaaatgacgcgatacccgctttttgtggttcggtcagtggtactttaatattgcgctccacccatgccagcgccttatcacgctcaatggcgttgacctggtcgcatttttccttcgacagtttcatattgggaaaaacggtttttccatccaccactgtggcaccccgacagatggtccatatgccagaaccatcgcggtatgccattgtgtggttaccttctttttcgtccagaaactggtcaagtatctgaggagcagatgcgccagcaccaatcagcgccagaacggcagccgacaggccgtatctgatttttgtgttcatagatatttatgatgaggacgctcgtgcttattggcaggattttcaatcttaaaggagtactgatgctgcagataagactcaactttttctgacaatttttctgctacttccaggaagacttgccggacgctccttctggctgctgcctcataaaactccagcgcagctccttcaacacggtccatggcgacatccaggtcaaaaatttcaccgtcaaagcgttctttgtcctgtaaggctacagttaccgtaactttattctcaaaattacggactcctttcacaaccagttcatagtcttgagtcattggattactctcctctcgcagccttacgcctgtcttctttaatcttgaaataaagatttgtcagatacgtcagcaggccaaaaaccaggctacccagcacaccgattgcagcccactgtgacggagttactttatcgagtaactgcaatgcccagaaaccagcattacccgccgatgtgccataggcaacacctgttgttaacttatccattgatttcatatcctcaccccgatgtacacggatggtgcaatatgtttgaaaagatcggagtctacggggtagttttgacagcacacgttgttctcaacggcgctaaaaaaacatacacattaaaaatgtgggtaattattttgaaagaaagtcatatataaaataataatacgagaaatgttttcatatttagtgtactgtatacggccatttatacaggaaaagcctatgtcagaacgtaaaaactcaaaatcacgccgtaattatctcgttaaatgttcctgcccaaactgcacccaagagtcagaacacagtttttcaagagtacaaaaaggtgcccttttgatctgccctcattgcaacaaagtattccagacaaatcttaaagctgtagcctgattgattttattagtaacaagtattttttatattttaataatatatttaaagcagataataaaaaacccgcctgagcgggtttgagattgtggtgctttttgtgggagtcatccacttacgcactttgttttgccatgccagcagttagcttctgctgtaaaactattcatgcagcaaacctgcacttcaccacaatggttagcatacttttcctgattaagattttgccaaatatgctagccattgtttcatgtattggacctccttactttttattaaagagatccaatattcactactctgtctgtatctctactcaggcatcagccttcttcgttatcgtatacagacgagcgatgaattttaatcagtaatgatgacatttgctgctgcaggacctttagcaccactctctatagagaaggtaaccttttgaccttcaaataaggttcgataattatcattctgaatcgcagaaaaatgcacaaacacatctttactaccatcaacaggagaaataaagccgaaacctttatcagcgttaaaccattttactaaaccagtcattttatttgacattctacattccttaacttgagcctttcggcataaatggtttgcataacagaaacgacttcgtacttaattggagagactcaaagaaggaataagtgaataacacctgaaatgagaactgctttagtaaactacttcgtatatcgtctgttcttcaaaccgacgcaatcattaacgcatagttgaacatatgaagcaatgtttattttagacatccagccatcttcaaccccatcaaaaaactatagctttcttcaggaacgtgtgtatagtgcgccaagttatcagtattaaggaatttttttgtcccgtaaaatgacaggaattgtcaaaacctttgacggcaaaagcggcaagggtcttatcaccccatccgatggtcgtatcgatgtccagcttcatgtttcagcgctcaatctccgcgatgcagaagaaattaccaccggattacgcgtggaattttgccggataaatggtctgcgtggcccttcagctgccaatgtttacctttcatgagctatattaaagctttaatttcaggccccatcggatcacacatggagagtttttatgaataaccccgtctgtcttgatgactggttgattggctttaaaagcttatgctgtactttggccgtaatagctctgctaataatataataagcagactcattgtgtttagggacattgtactggaagaaaacattttaaacatcaggcaaataaccaagtcaccagctaaataataagttaacagacatgagtcccgggatgagattcaacattaccattgccccatttaaagcacaaaacccgctcatcagcgggttttctactttttcttaacgtcgggtatacaaagcccatcgttgaaaaaattttatccatattttttgaaaaatgcaaacatcatgtcgccatcttcagcaaaaatcatttatctcgtcaccttcctcaattgcgcttccgcgtatgcttcttcctgccagcactttgttaccagtttaccaatgacgtccgcataccccttataccactgataatcggtcaggtctggtaccagcttctggacatgacgtcgtgccagcgtggtcggtaaacgactaaaccggtttccattacaacgcccacaaatcttatataccggtacgccatgaaaccgggttcttttttcatccagaacaatccctttacccttacaccctctgcacgctgtgctggcttcgcccttaccatggcaatgctgacatagttccttcacccattcttccttgattacagattccccgcgtctgtagtgtttcaccacttcgcgcaatacattataaaatcccgtacctgaacaatgctcacagcgagccttacttgccgcagacctggagtaatcagcaaaggcaaaactcacgaggtaaggaataatctgtaaccggatttcttcactcaatttgttcaatgtcgggttatccagtgccatcgcgtaatttagcaggccttcaatcgcaaactgagggtcctgaacaccaacttttgccagaaataaggccaacccaagtggtgctttcgactgcaccatcccctgcgctgccattacatccgtaattgttaaacaaccggtgcctgtcgctggagcgtcatcgctcaattttggagattttggggagtaatattttggtaaggcttcaaggttcatgctcgttctccacttacgccagtacgccaattgccagcgcgcgatcgataaaacgaaatatcagctccagttgggagccatacttatcttcaaatgccactgtatccgtatgcagctcgttgtgatgctttctgcacaaaggcaacacaaagagatcatgtgcttttgttcccattccgccctgcccgtgaccaatcagatgatgcggatcgtcggctggcataccgcagcaagcacacggctgtgtcttaacccaacgtgtgtatttctccttaacccagcggcgacgtttaggcagcttcatgaaagattccggagactctggatcaacggtgatgcttaccaccgtcttttcctgtggtgatttttgttgctggtgggcgtaaggcaacggtgcaagattttttgtgcgttgtttcaatatgctggtggcggtctgctctcccggtacgatgtcgctttcgcggtacaccgagcagattttttccgctggtaatcccagcgaacgacgcgatacagcctcaggtagtgcatccaccacctgattgcagaccgcccaccaggataattcagccaaagataattcccgctcctgcgtaccgcttattgcgtgacggatgacgtcaatcacccatgctgtcagattttgttgagcaagcagctccagtgattccgatgtctggtcacgcagttggttgtcgcagtgccagcacaacaccattgcgccggtaccataacggtgaatgactgtttcagtgtgatggtaatcgccattaggccactggcaggatgtaacatgacgtaatagccagtcggacaatgcgccaacgccgccagcagcacgaatcacccgttcgttactaaaaaacggcagcaatgttttgtcttccgccagcggctggcgaacggcaggaacgactccggatggcagattacgcatgctttttggttccggttccaccagcactcgaggattatgaaatatctgtatggattcacggcccggcttaaggaccaccagcccaagctcaggcaccagaacaggtctaagtaatacccgcacgttacctccagatccgttgctggaaagtgcgggacgcacgtggtgggcgttcggaataaggcagcctgacagagattatccagtgccgatagtcgagactgagagctttcttaacctcgaacccgcgcctgcggtaagaatgaatcagccattcggcctgttctgcagtgcatggagggtgctggaaccattcagacttgaatgcgtgagaataccgcccgtgcgtgcaggcaagaacgggcgaattatcagaattgtaatattttgcgttgcgtgccatcggttttctccggtggcacggtgttactcagcgggagttcagccccgcgcaagattgtagatgagtttattctcctgaaaaagcagaaaagccagcttttattccgatctctttcaatgcctgtaatgaagtgacaaactcaccttcgcgcaagataaatccgtccgtgacccgagcatccacaaaattaattaacgcagccccattctttcgcaaacacataatgcggtaatgactaacaagatttccattttcaacgcacacagcatagaggccatcttcacaaaaaattttacgcagttcttcgatgttcatcatcagaatccttccggataattagctctcccctttaagggaccatccctcttatccctgcgcgctacttaagtatttttgattctattccggcaccgtccagaacttcaaacgcgttgaaaataaaaacaaaaacccgccgaagcgggttaagtgcgggtgcgttgaggatgcctgccacatcagaggtggcgagggatttctcccccgccgggtctcttactcctcaggttcgtaagctgtgaagacagcgacctccgtctggccggttcggattcgtacctcgcagaggtctttcctcgttaccagtgccgtcactatgacggttaaacagatgacgatcagggcgattaacatcgccttttgctgcttcatagcctgcttctcctgtcaacgcaaagcagaagtgtcaccttcggtgcgaaacagagatgtcatgctttggttcagagaatgcgtttgaccgcctcgctatatacttccgagtgttctcttttcccaacagaaatcacgaaaacgacaactttctcgtctataacctggtatacaaggcgatagcctgaagaccggagcttaatcttgtaacaatcaggcataccacggagcttgtttgcttcaatccggggtgactcaagtacttcaaccagcttctttttcaactgttcacgtaccgtcgagcccagctttcgccattcctttagtgcccgctcgtcaaaatccagaaaatacgccatcagagttcatccagcgtcacacgtactggcttaggattacgaagccgttctttcactatctccacaagttcagcatcttcatcactcaggagtgtctgtttgaacggcaagcgttcattgtcagcgatatactcgagcatgagacgaagcgcttcagaaggagttacacccattttttcaagcgcggcgtaagaacgcgctttaagttcatcgtcaatacgcaggttaatgctacccatgtcttacacctcttgtaattacaaatgtcattacaagtatcgcactacaacatgcttagggcaagtcacgaaggaagtcagaaagtagtcgtaagaacggtgatcactgtccgctttgtgccaggagcagccattgctaagtccatcctgtattgtgcaggtcagctcgtttttaaagagtccggccatcatcttactggtacagacaccatatactttgtgacggtcaggctacatatgcacaactcaacttattcatctattttttgctttagcatgtcagtgttgctttctcgtcggcgggtgagcggtgacctgacctgtcgataaaggaacgtaacacgttttatgcaacacccgcatgcggcagaaaattattgccgaacgtttacccctgtcaacaagctttactttctgaggcgcgccagcccgcgaggaaaacaatctgaacatcaaacaattaatgacacaagaaatacgattaaagatttttttgtgcatgccgatagtgcttttttaaaaggagaaatctatgtctgtcacaattcagggaaatacctcaaccgttatttcaaacaactccgccccggaaggaacatcagaaatagccaaaatcacaagacaaattcaggtgctgactgaaaagcttgggaaaatctcatcggaagaggggatgacgacacagcagaaaaaagaaatggctgcattggtacagaagcaaattgaaagcctctgggctcaactggagcagttgttaaggcagcaggcagagaaaaagaatgaagacgcgacagttcagcctgataaaaaagaagagaaaaaagacgatacaaataccgctggcaccattgatatttacgtctaagtgacagccgtattgtggccctcatcgggccacttttcgccatcagccttttctttaaagacatattatctttgtatcatttctgatagttaacattacaagatataagtaatggacgcactcccaattagtctatttaaatcgccacgagtttaactgacaacccatgatcaattatgaattgcaactatttctgtagtcacttttgtggggacagtccacaaaactgccaacttccgcttcttgctcttagcggacattagcataggctatttaccataacgcctcattacgcgcaccgcccagactgactcagcgcgtttctggcatatccccggtaaaacaagtaacaaaccacccgaaaatgaacaccagaaacgcgacttaagaatctaccctatgaatggatatgcactcaaccgaatcgatcttggtttcaatcttttttatcgggatcaggcttctttttaggtaacttcgggggcttaacttgctgatgactttgcgttcggcgcgtaagccagggatggtcagctttaggtttaacatagtattttgagcgtaaatcaatacgggcattatccactcgttcatggacactcttttcatcatccagtggtataggctccgggccatcaacatacttttcccagcccagcgctttcccgtcatacagaacgttaatttcaccgtcaaagttctcgcatacagtaacaaccgaatgcctaagtcgatatccccggccctcactgcgtacctgaaacgcactgcttttgtactggaaagtgagatttttagacagaacgcgcttcgcctgtaggctgaagatataacccagttcctcttcagaatggtgcacatcaagatgagcattatcagtagtacgaggcgacgtagcgaaccggttgttataggcttcaataaaggtcggcaaccatgcatttgctgtttcaatatcactgatattctgaagccgcatttctttgaccagcctgtcctgtagtgtctgattggcgcgctctacccgcccttttgcctgcgggctgttggcatggattggctcgatgcccagtgtctttatcgcacgagtgaactgggtcagctcaccttcccgctctgggttatttaccctgaatatactgtgtctatcagagtagagagcgagcggtacgccatgatcattaaggtaaccccggagggtttccatgtaagcccgggttgtttcagcaggcacaaaacgcaacgccatcaacgcactggtggcatcatcaatgaaaacgatcagtgtacatctggggcctcgattttcaaaccagtcatgaggtgagccatcaatctggatcagttcaccgtaagatggtcgtcgcatgcggcgttgatatatacgggcaattttacgacggcgttcacgccataacccctcttctatcatccactttctgagagtttcaacggataaagataaaccgtgtatctcgcgcaatttttcgcacgcaaacgtaggtccaaaatcagcgtaacggcctttgaggagtgaaattactgttgctctgaattcagtagaaaaggaattattaggacgctttccacgtcggtgggaaaccagaccagaaggcccttcatttctataccgttgcaccagacgtttaacctgccgaatagaaatgccaatgcgtgccgcagcttgttcctgaataatctgaagtcggtggagttccttatgactcatcgtaacagtctctttgatcatgaaaaatcccccagagaattgtctggggacattttagaatggttcaaaggggacattacagcttggtgttaacaatagcctgcttctccgtgcctttcggcacgtaagaggctaacctacatgtgtctagcatgaaattggcctcagattaatgttaagcgtcttgcaggacgcgtaatgttaactggggcttttctctatctgccgttggtgtccatgcccgaggcagatagcctcaagcacccgcagtcattctacttaactaagatttccccgcaaaccgtttttgtccagcacagtaaatatccaactaaaccaatggagttcgctgtatttaccgccagtattcaatgcacatgaccgccatgaacacccctaaaaaaagggcatttatatatccaaatattaatatcaaaacatcaactttttccatataccttgctgtgaagatgatgggcatacatgatgcgaacaaccagaacgcaacaaacaaaaactgcaatgcgtttttcattattcctcctacaatcaatgtgcaattacatttaaacacacctcaatttggccggacatataaatatctaaaccagaaaaaatcacttacatagcgttacaaactctttagtctaaaggttcatcgtaaaacattccccatacttatcagtccgttccgcgccaggtagctcattgccttatctggcaacctgtaatcaggtttccgctttttcagttggctggtcgtttaaccgacatagttaatccattaatctagttgccggatgttggtggattttcgcgttttagttgttcataaaagtgcacagctttaaccagttcttctgatgtaactgggactggtgaggcagtgaataaggcctgaatttgatagttcggcctgtcgttacaatcctcttttttcggtacatatttccagtcaccagaccactacttcccctgaaagtccgtaacgccttttttcacgtagcgatatcgccatgccactggttttgcttgccccgccgtttcatgcccttcctgataattaatctcgctcattcatcgccccactcatcacaatatgcttcgaccggagtttttcccgcttcatagtcatcacgctaggattcgacatcagcagcacttccaccgcgtaactcaccatagtccattaatagttcatcccgctcttcaaaactgatgttatatttagctgaacaaaaatcagccactttgttcttcctcatcgtcttttatttcgtggtatgagtaattgcagtagttaaagaaaatttcttatgctccgtcatgaatttcctcaggtgttgcgtcatcgtccacttcgaatacatcctcaaaatctccaccagctattcccgtttcaataataattttgaactttcgcatttcactaccgccctttcgggcggcctcctgatgttctgagggtgcagaaatccatccggttaaggattaaattttatttacagaactgaatttaattattcagatatacgtatctgtagccttacgaatctactcactggatgcctctttcataaaaataatccagtgggttttatcgttttttccctgttcgttgacagataacaggttttctgtctgtcagtgccagaatctggcttaccggtatttgcgtttcattccattaaaaaatcagaacgccgtgcggcctcaacacccgaaaggcttctttaaatctctgtcgcgaatcatcacgccaggcatctttattcagccgtccatatttctttcccatccaggcgttatcaccaacactctcaagatgcggagggtctaatacaaccatcgaaaaagatgcgtctgcaaatgataatgcacgaaaatctgcgataatgtcagggctgataatcaagcgtctcccattgcgtaatgtgtatccttcttttctgatatcgctgaatatcgcccgttcgtcagacttatcgaaccagaacatgcggctgccacagcacatatcaagaatggttgccggtgcactcactgcgccacgtcctgaaaattaccctgatagaaagccagtatgcgctgcataacttcgctcttccggcactcgcgacagattatgtttaggcgactgtcgtagcgacgtatttctccgtcaggtgatgaccagataaggtccggatcaaccacagcaggtttcttcacctttgccctcgagagttttttgcgggcgttttgccagtccttacgcgcctgttcagaggggaataacccgtagccggagttgtatacatcgccactggctaccagctctctggcaagaacgctcatcagatatctagtcgcacctgttttagcttccagttgccgtaacgtctcacggccgctctggcgcacgagttccaccacctgccatttaattttttcccgctcttcttgtgtaaaaacttttgccacaagtcccccttaaaattacctcatgacctgaaatcaacacttatcctctgaaaccaggcggaatttctgtatccggttcagaaatatgattaacacaacgctgtacaggtgaacgtcccaggcggatgaccagttcgtcccatttttcgcggagctttgacgggctcatgatgttttttacccagaatggatctcgctgaacccgaccaaacatttcgcaaatttgtctgtggcttctgccatccagcatccgcattgtgcgcacgtcattggcccaggcagtccagttaggctcttttggtcgcatgatctcgccatcatcactggctgcctgttcgtagagacccacgatccgcccccagatccactgcgcacacgccaaatcctccctgctaccccactggcgttttttcgcactaaacacaaccgcgtcggagttccgggttaaaaaatcctgttcagtcgtctgcgggtccggttgcgaagcttccggacgaaaagtgtttttattctctgtagtaatctctgttgtattctctgtaagatcatcaggccattttgacccgatgacattgggtcgttttgaaccaatggagcgtttcattttgacctcttccatcgtgtcattttgacctgatggagcggcgcattttgaaccgatggattcgctcaatttgccaccatctaaaagctcgctcccatagttgatcgtgtagaaattggtcatatcgcgctttgatttattgagcttttcacaacgcaaaagccccagcgttttcagacttgcaaacgcgcgctttaacgttgactctgaccagaatgggaactgttccagccattgttccgttgtgttataaatccagcgaacaccatcacattccatgccggagttggtatctctcaaccagtagtgcagttgttgcaaaacaatggcttcgtttaagccaattttcattgccagctgcgtgtttataaccagtgggcgttcagcaaaaagaaggctcataattccatccagctttttgttggtattgctgtcgatacgcaagtttgaaagcaattgctttttctataagttcgtcagtttcacgatccactacggcaggatcagcaaaaagcagtccggactccaccacatcgccatattctttgtttaacccggcgatcatgcacgtgatgctttttccgtcagtaatttcacgatacaacctgaaatcattaatccggatatccggcgttaattgttaactggttaacgtcacctggaggcaccaggcactgcatcacaaaattcattgttgaggacgcgataatgaaaacgttattaccaaacgttaatacgtctgaaggttgttttgaaattggtgtcactatcagtaacccagtatttactgaagatgccattaacaagagaaaacaagaacgggagctattaaataaaatatgcattgtttcaatgctggctcgtttacgtctgatgccaaaaggatgtgcacaatgaattcagcatttgtgcttgttctgacagtttttcttgtttccggagagccagttgatattgcagtcagtgttcacaggacaatgcaggagtgtatgactgcagcaaccgaacagaaaattcccggtaactgttacccggtcgataaagttattcaccaggataatatcgaaatcccggcaggtctttaaaacagttccgtaataaatatccggtttcattcttatatgccagcaatggcagggatttgttcatccttaaatctgtcatgaggttaaaacaaatgagtaaagtctttatttgcgccgctattcctgacgaactggcaacaagggaagaaggcgctgtggctgtagccacagccattgaagctggcgacgaacgccgtgctcgagcaaaatttcactggcaattcctggaacattatccggctgctcaggactgcgcttataaatttattgtctgcgaggataaacctggcataccccgccctgccctcgattcatgggatgctgaatatatgcaggaaaaccgctgggatgaggagtctgcttcttttgtcccggttgagactgaatccgatccgatgaacgtcacttttgacaagctggcccctgaagtacagaacgctgtcatggttaagttcgacacatgtgagaacatcaccgttgatatggttattagcgcacaggaattgttgcaggaagacatggcaacattcgacggacatatcgttgaagcgttgatgaaaatgccagaagttaacgccatgtatccggagcttaagttgcacgccattgggtgggttaagcataaatgtattcctggtgctaaatggcccgaaattcaggcagagatgcgcatctggaaaaaacgtcgcgaaggtgaacgcaaggaaaccggaaaatacacgtctgttgttgatctcgcccgcgccagagccaatcaacagtacactgaaaattcaacaggaaaaatcagcccggtcattgctgccattcatcgcgaatacaagcagacatggaaaacactggatgacgaactggcctacgctctctggcctagtgatgtggatgccggaaacattgacggcagcatccatcgctgggcaaaaaaagaagttatcgacaacgaccgcgaagactggaagcgtatctcggcatcaatgcgcaaacagcctgatgcccttcgctacgaccgccaaactatttttggccttgtccgtgagcgtccgatcgacattcacaaagatcccgtagcactgaacaaatatatctgcgaatacctgacgacaaagggcgtgtttgagaatgaagaaacagacctgggcactgttgatgttctccagtcatcagaaacacaaactgatgcagtggaaactgaggtatctgatatcccaaaaaatgaaaccgcgccggaagctgaaccatctgtagagcgtgaggggccgttctatttcctcttcgcagataaggacggagaaaaatacggtcgcgcaaacaaactctctggtctggataaggcactggctgctggcgccactgaaatcacaaaagaagaatattttgcccgaaaaaatggcacatacacgggcttaccgcaaaatgtagataccgctgaagattcagaacaaccagagccgataaaagttaccgctgacgaagtaaacaaaattatgcaggcagccaatatcagccagcctgacgccgataagttgcttgctgcatcacgtggtgaatttgttgaagggattagtgacccgaatgatccgaaatgggttaaggggctccagacccgcgattctgtgaaccagaaccagcatgaatcggaacggaactaccaaaaagcggaacaaaacagtccaaatgcgttacaaaacgagccagaaacgaaacagcctgaaccagtagcgcaacaggaagtggaaaaagtctgcaccgcctgcggtcagaccggcggcggcaactgccctgattgtggcgcggtgatgggcgacgcaacataccaagaaacattcgatgaagagtatcaggttgaagttcaggaagatgatccggaggaaatggaaggcgctgaacatccacacaaggagaacactggcggcaatcagcatcacaatagcgataatgaaactggcgagacggcagatcacccaattaaggtgaacggtcatcacgaaatcacatccaccagcaggacgtgtgaccatctaatgatcgaccttgaaaccatgggaaaaaatcctgatgccccgatcatctcaataggtgcaatatttttcgatccgcaaaccggagatatgggaccggtatttagtaagactatcgatctggaaactgctggcggagtcattgatcgggacaccattaaatggtggcttaagcaatcacgcgaagcgcaatctgccattatgaccgatgaaatcccgttagatgatgcactgttacaattgcgagaatttatcgacgaaaactccggtgaattttttgttcaggtttggggaaatggagccaacttcgacaacacgattttgcgccgttcatacgaacggcaggggatcccctgcccgtggcgttactacaacgatcgcgatgtacgcacaatcgttgagctggggaaagccatagacttcgatgccagaacggctattccattcgaaggtgagcgccataatgcacttgatgacgcccgttaccaggcaaaatacgtttcagttatctggcaaaaactgatcccgagtcaggctgattcttaatgttcaactgtcgccggttgtgactggtattctgcaaccggcgctcgtctgatgtaagagataaagaaatcgatgagcgaagtaatcatgattgtctctcccggcaaatgggtatccgaagagcagttaattgcgctgaaaggaataaaaaaaggtacgttaaaaaaggcccgggaaaaatcgtttatggaaggaagggaatataagcatgtcgctcatgacggtatgccatgggataacagtccatgcttttacaacctggaagaaattgatcgctggattgagcgccaggcatcagcgagaccaagacgtcatcttacttgactaaaagccacactaactaatgagagaagttgaaatgaaatatccgacaggcgtggaaaaccatggagggaaattacgtatctggtttgtttataaagacgtaagagtcagggaaaatctgggggttcctgacacagcaaaaaacaggcgcgttgcaggtgaactacgctcctctgtttgttacgcaataaaaactggtgttttcgactatgcaaaacagtttccctcctcacgcaatctggaaaaatttggtgaggcccgacaagatttaaccataaaagaactggctgaaaaatttctggcactgaaagaaactgaagtcgccaaaacatcactcaacacataccgtgccgtcatcaaaaatatcctgagcataatcggtgaaaaaaatcttgcctcatcgattaataaagaaaaattactggaggttcgtaaagagttactgactggataccagatccccaaaagtaactatattgttacacaaccagggagatcggctgtaactgtaaataattacatgacaaatcttaacgccgtgttccagtttggtgttgataacggttacctggcagataatccgtttaaggggatctcgccattaaaggaatcaagaaccattccggatcctctttcgcgggaagaatttatccgtcttatcgatgcgtgcagaaatcagcaagcaaaaaatttatggtgtgtttctgtttatactggagttcgccctggtgagctgtgtgcacttggatgggaggacatagatctgaaaaatggaacaatgatgatcaggagaaatttagcaaaagaccgtttcacggtaccaaaaacacaggcgggaaccaatcgggtcattcatcttattaagccagcaatcgacgctctccggagtcagatgacattaacgagactgagcaaagagcatatcattgatgttcacctcagagagtatggcagaacagaaaaacaaaaatgcacctttgtttttcaacctgaagtgtcagcgagagtaaaaaattatggtgaccattttaccgttgactcaataaggcagatgtgggacgcagcgataaaacgtgccggactccgccatcgaaaatcatatcagtcgagacatacttatgcctgctggtcgctgacagctggtgctaacccggcatttatagcaaaccagatgggccatgcagatgcgcaaatggtatttcaggtatacggaaaatggatgtctgaaaacaataatgcacaggtagctttgttaaatacacagttaagcgagtttgccccaaccatgccccataacgaagcaatgaaaaattaatttaatatttatcaaatagttaacacgcatgactcttgaaatccataaattcaagcgcagtgcccagccatcccgatactgctgctttcaccaaatccttagtgcttctttcgtgtttttctattgtcataatggttatctctaaaaaagaggtaagatgcgtactacttactcgccgttattggtattattcagaaaaagtgagtaagactttgcagcaatgtttttgatcctgttcaaataaactaatggcatcagcaacatgctggaaatcaaacgtatgggtaattaatttttctggtttaattaaccctttacttaaccagtcgataacgatcgggaatttatttgcatttaagcgtgaagagaaaatagagagttcttttccggtaattccttgctgaatcacttcagacggttcactggagaaccccatcaatacaatacgtgccgctggagaagccagcgttacggcctctttcaggatagaaggatgacaagccgcatcgataattaatgtcggcttgatgcctttttcagtgaaaatctcgccaagcggtgtctggctgttattaatcgcccagtcagccccgctctctttcgctttttccagtcgttcatcaatgcgatcggcaacaatcacatttttaacgttatagacgccttttaatacctgaacgatcgtcaggccgattggaccggcaccataaaccagaacggtatcattttcagtcggttgaccatgtccggttacgttagccgcaatggtaaaaggttcgatcattaccgcatattgatcggccactgcttcaggaattttccacgcattttttgccggaaccacggcatattcactgaaaccaccgtcagcgtgcacacctaatacagccagtgtcgtacaaacgttcggtttacctatagagcacggatagcaatgcccacagctgaccaccggatcgacagcaacacgttcaccgactctggcgctttccacgccttcacccactgcatcaatgacgccaaagaattcatgaccaatgacgcgcggatatttcgcaaaaggattatgcccacgataaatatggctatctgaaccacaaattccggcaagtttcacttttactcgtacttcacccgctgacggggtgggtatttcacgttcgacaatcgccagttgattcggtttttcaattaatatgcttttcattatcttactccttaccagttccacagcgtgccatcttccagacgtgcgactggtagataagcaggttcatagggatatttcgccgccagcttttcatcgaattcgataccaagacccggtttgtctcccggatgcatatagccgttatcgaaagtccagttgtgcgggaagacttcgagcatttgttcggaataacccatgtattcctggacaccgaaattggggacccacagatcaaagtgcagcgccgcagccatgcagactggtgacaaatcggaaggaccgtgtgagccagtacgtacctgatacagcgaagcaaaatcggcaatccggcgcataccggtaattccgcctgcatgggtcagcgtggtgcggatataatcgatgagttgctcttcaatcagttgtttgcagtcccagatgctgttgaagacttcacccactgcgatgggtgtgacggtatgttggcgaatgagacggaagcattcctggttttccgcaggcgtcgggtcttccatccagaacatgcgataatcttcaatgcttttaccaaagcgcgccgcttcaataggcgttaagcgatggtgcatgtcatgcagcaaatgttcattaaaaccaaacttgttacgtaccgcgtcaaacaatttcggcatgaaatcgaggtatttctccgtcgaccacagctgctcttccggccactgtcctttggttgcgggttcataagccagacctttacctttcgacatgccgtaggtggttttcataccagggattccgcactgcacgcggatggctttgaatccaagctcttgatgacgggcataatcatccagagcttcatcaatactgtgaccggtggtatggcaataaaccatcaccccttcacgagacgcgccgccgagtaactggtaaagcggcatgttggcagctttggctttaatatcccacagcgccatatcaaccgctgaaatggccgacatcgtaaccggaccgcgacgccagtaagcacctttatagaaaaactgccagatatcttcgatacggtgcgcatcgcgaccaataagctgcggacaaaggtgatcctgcaaataagaggccacggaaagctcacgtccattgagggtggcatccccaaggcccgtaataccgtcctcagtggtgatttttaatgtgacgaaattacgccccggacaggtaacaaaaacttcagcctttacgatcttcatgttcgattccttgcatcgcttgtcgtgatgcatgaaatctacgcaactgagctactaccatacaagtataaagatcgaaaaaagccggagtgatcacaaaaaaaggcgtatatttgcgctgtgaatggttgacaaaagatgaaatagaataccttttgtcagctgacacttcctcttatcttattgataaaatggatttatgttcctacgtgcgcccccagcccgcaacaatgatcaacatgccgcaaagcgcaatcaacgcacccgtccagtcataaagagtcagtttcacgccatccacaacgcgcagccacatcaacgccgtgcagacataaacgccaccataagccgcgtaaacacgcccactcgccgctggatgcaacgttaacaaccagacaaacagcgccagtgaaatccccgccggaagcaacagccagatactggcgtttcgttttaaccacaaccagggcagaaagcatccaataatttcacacagcgcagtagcaaaaaatagtaacgttgttttaatcatctttgtctcttattgacatcatgtatagttatagggcgacataatatcatcaatataaacaccctcctggtacgttttgcgtccgcagtggatggtgtagaatcacctttaatcattcatacagggaatgaattatgaaaatcactctcagcaaacgaatcggcctgctcgctattctgctgccttgcgcactggcattgagcacaactgttcatgccgaaactaacaaactggtgattgagtctggcgacagtgcacaaagccgccagcacgccgctatggaaaaagagcaatggaatgacacgcgcaatctgcgccagaaagtgaataaacgcactgaaaaagagtgggataaagccgacgccgcttttgataaccgcgataaatgtgagcaaagcgccaacatcaatgcctactgggagcccaatactttgcgctgcctggaccgtcgaactggccgcgttattaccccctaacctgttattgatttaaggaatgtaaggacacgttatgccaagcgcccacagtgttaagctacgcccgctggagcgtgaagatttacgctatgtacatcaactcgacaataacgccagtgtgatgcgttactggtttgaggaaccctacgaagcctttgttgaactctctgatctgtatgataagcatattcacgatcagagcgaacggcgctttgtggtggaatgtgacggcgaaaaagccggtctggtggagctggtggaaattaaccatgttcatcgccgcgcagaatttcagataattatctccccggagtatcaggggaaaggtctggcaacccgtgccgccaaattagcaatggactatggctttaccgttctcaatctctataagctgtatctgatcgttgataaagagaatgaaaaagcgattcacatttaccgcaagcttggcttttcggttgaaggtgaattgatgcacgagttctttattaatggtcaatatcgtaatgccattcgcatgtgtatattccagcatcagtatctggcagagcacaaaacaccgggtcagactctcctgaagccgaccgcacaatagcattaataataatcgatcgtatttttgatggtgtaaacccgttcgacggcgggttttactccttcatcaacaatgattagctgacagtccaccggattagcgtgactgtcatattcacagctctgttttacattaccaacccgttgattattcagtaaagtaaccgctgtgtaatctaattttttgatcggatccgttgatggcgtggcgctgacagataatgttttgtcgttacttttcgtggttttacccagcggataaccctgatcatcatagcgatattccatctgcatttgtttgctgctggctttaatcacgaagccattatcatcggtttcccaactcaccccggcagaaggtaattctgctagctggcattttccctgtaaacgtactctcttctccagcgtctcggcatcacggtaataattggcgtccagtaccagagcgaccacggtattattttccagatccagtaattcgagtgaatcaaaacagccttcttccgacaaagtcccagaaacacgtttcgtcacttcaccttgctcatccattaatgtctgagtgaaatcttttaccggaccacgcagcggatcaaaatcgaattcattagagaaactggccatctcaggggtaaatgaaagtgttacctctgtgcggtcacatcctgtgaggaatatcgcgagtaagcatggtagtaatttgtatttcacaacagtcaccagagagtagagatgattctcaatcatagtagcaaatacagtactttacacgttaaatgctatgcttaaagaagttatcttcgcgtaaggagcttatgatgaaactctcaacctgctgtgccgcgcttctgctcgccctcgcctcacccgcggtactcgccgcgccgggatcctgtgagcgcatacagagcgatatatcacagcgcattatcaataatggcgtacccgaaagcagcttcacgttaagtattgtacccaatgaccaggttgatcagcctgattcccaggtcgtcggccattgcgctaatgatacgcataaaattctctatacccgcaccaccagcggtaacgtctctgctcccgcgcagtctagccaggatggcgcgcctgccgaaccgcagtaacacattatcgactgaacgccggatatgacaaatccggcgatttgaacatacaacataatcccaccttattactcatacccttctattgatatggattaataattcttaacccaaaatgggtggactccctctattgttagcgcgctaaatattcaatatataaacttttatataacgataaagaacagggagtgagttatgtccaaaaatgaacgaatggtgggcatcagccgcagaacactcgttaaatctaccgcgataggttctctggcgctggctgcaggcggtttttctttgccgtttaccctgcgcaatgcagcagcatcggtacaacaggcccgcgaaaaagtggtctggggtgcctgttccgtcaactgtggtagccgctgtgcacttcgtctacatgttaaagataatgaagtgacctgggtggaaactgacaataccggcagcgatgagtacggcaaccatcaggtacgcgcctgtttgcgcggtcgctccatccgccggcgtattaatcatcccgatcgcttgaattacccaatgaaacgcgtaggcaaacgcggcgaaggcaaattcgaacggattagctgggatgaagccctggatactatcgccagtagcctgaagaaaaccgtcgaacaatatggcaatgaggctgtatatattcagtactcttcggggatcgttggcggcaatatgacccgctcttcgccatcagcctcggcggtcaaacgcctgatgaactgctacggcggttcactcaaccagtatggctcctacagcactgcgcaaatttcctgtgccatgccctacacctacggcagtaatgatggcaacagcaccacggatattgaaaacagcaagctggtcgtgatgtttggtaacaacccggcagaaacccgcatgagcggtggtggcatcacttatcttcttgaaaaagcgcgcgagaaatcgaacgccaaaatgattgttatcgatccgcgatataccgatacggctgccggtcgtgaagacgaatggctccctattcgcccgggcaccgatgccgcgctggttgcgggtattgcctgggtattgattaacgaaaatctcgttgatcaaccttttctcgataaatactgcgtcggctatgacgaaaaaaccttacccgcagatgcacccaaaaatggtcactataaagcctatattcttggtgaaggtgacgataaaacagcgaaaacgccgcagtgggcttcgcaaattaccggtatcccggaggaccgtatcatcaaactggcgcgtgaaattggcacagcaaaacccgcttatatctgccagggctgggggccacaacgccaggcaaacggcgaactgactgcacgcgctattgctatgttacctattttgacgggcaatgtcggcatcagcggcggaaatagtggcgcgcgtgaatcgacctataccattaccatagaacgcctgccggtgctggataatccggtcaaaacgtcaatctcctgcttcagctggacagatgctatcgatcatggtccgcaaatgacggcaatccgcgacggcgtccgcggcaaagataaactggatgtgcccattaagttcatctggaactacgcgggaaataccctcgttaatcagcattctgacatcaacaaaacgcatgaaattctgcaggacgaatcgaaatgcgaaatgattgtggtcatcgaaaactttatgacctcatcggcaaaatatgccgacattctgctgccagacctgatgaccgttgagcaggaagatattattcctaacgactacgccggtaacatgggatatctcattttcctccagcctgtcaccagcgaaaaattcgaacgcaaaccgatttactggatcctgagtgaagtcgcgaaacgtcttggacctgacgtctatcaaaagttcacagaaggtcgcacgcaggaacaatggttacaacatctgtacgccaaaatgcttgccaaagatccggcgttaccgtcttacgacgaactgaaaaaaatgggtatctataagcgtaaagatcccaatggccattttgtcgcctacaaagcatttcgtgacgaccccgaggcaaatccacttaaaacgccttccggtaagattgaaatttattccagcaggctggcggaaattgcccgtacctgggaactggaaaaagatgaagtgataagcccattgccagtttatgcctcaacctttgaaggctggaactcccctgaacgtagaaccttcccactgcaactgtttggtttccattacaaatcccgtactcactcgacctacggcaatattgatctcctgaaggctgcctgccgtcaggaggtgtggatcaaccctatagatgcgcagaaacgtgggattgccaacggcgatatggtgcgggtgtttaaccatcgtggcgaagttcggctaccagccaaagtaacaccacgtattctccctggagttagcgctatgggccaaggagcctggcacgaggccaatatgtctggcgataaaatcgaccatggcggctgtgtgaatacgctaaccactctgcgcccttcaccactggcgaagggaaacccgcagcacactaatctggtcgagatcgaaaaaatataacccacgacaaccataaattctggcatgacattttgtttgaaaagcaataagtgagtaatgatgaaaatccataccacagaggcgctcatgaaggctgaaatcagccgtagaagtctgatgaaaacctccgcacttggcagtcttgcgctggcaagcagtgctttcactctgccattttcccaaatggtccgggcggcagaggctccggtagaagagaaagcggtctggagttcctgcaccgttaactgcgggagccgctgtctgttacgtttgcatgtgaaagatgacaccgtgtactgggtggagtctgatacgacaggtgacgacgtctacggtaatcatcaggttcgagcgtgtttacgcgggcgctctatccgccgacggatgaatcatcctgataggttgaaatatcccatgaagcgcgtcggcaagcgcggtgaaggtaaatttgaacggataagttgggacgaagccctggataccatcagtgataatcttcggcggatcctgaaagattacggcaatgaggctgtacatgtcctgtacggaacaggcgtagatggcggaaacatcaccaactcaaacgtcccgtaccgtctgatgaactcttgcggtggttttctcagtcgctatggcagctacagtaccgcacagatcagtgccgcaatgagttatatgttcggtgccaatgatggcaacagcccggatgatatcgccaatacgaaactggtcgttatgttcggaaataacccggcagaaacgcggatgagcggcggtggtgtcacttactacgtcgagcaagcccgcgaacgttcaaacgcacgcatgatcgtcatcgatccacgttataacgacactgctgccgggcgtgaagatgaatggctgcccattcgccctggcaccgatggcgcactggcctgtgcgattgcctgggtactgattactgaaaacatggtcgatcagccatttctcgacaaatattgtgttggttacgatgaaaaaacgctgcccgccaacgcaccacgtaacgcgcattataaagcctatattctgggcgaagggcctgacggcatagctaaaacgccggaatgggcagcaaaaatcaccagcatcccggcagaaaaaattatccagttggcacgagagatcggttcagcaaaacctgcttatatttgtcagggttgggggccacaacgacattccaacggcgagcaaacatcccgcgctattgccatgctttccgttctcaccggcaacgtcggcataaacggcggcaactcaggcgtacgcgaaggtagctgggatctgggggtagaatggttcccgatgctcgagaatcctgttaaaacgcagatttccgtctttacatggacagatgccatcgaccatggtacggaaatgaccgcgacccgtgatggtgttcgtggaaaagaaaaactggatgtccccatcaagtttttatggtgctacgccagtaacacattgatcaatcaacatggcgacatcaatcacacccatgaggtgcttcaggatgacagcaagtgcgagatgattgttggcattgaccacttcatgacggcctcggctaagtattgcgatatcctgttgcccgacctgatgccaacagagcaagaagaccttatctctcatgaatctgcagggaatatgggctatgtgatcctcgcccaacccgcaacctcagcaaaatttgaacgcaaacccatctactggatgctgagtgaagtcgccaaacgcttaggaccagacgtttatcaaacctttactgaaggtcgcagtcagcatgaatggatcaaatatctccatgcgaaaacgaaggaacgtaaccctgagatgcccgactacgaggagatgaaaacgaccgggatctttaagaaaaaatgcccggaagaacactacgtcgctttccgcgcattccgtgaagatccacaggcaaacccgttgaaaacaccttcggggaaaatcgaaatttattctgaacgactggcgaagattgcagatacctgggaattgaaaaaagatgaaattattcatccccttcctgcgtataccccaggttttgatggctgggacgatcccctgcggaaaacctatccactgcagttaacgggcttccattacaaagcgcgtacccactccagctacggcaatattgatgtgttacagcaggcctgcccacaagaggtgtggatcaaccccattgatgctcaggcacgcggtatccgtcatggcgataccgtgcgggtatttaacaataatggagaaatgctgattgccgcaaaagtgactccgcgtattctgcctggcgttaccgccatcgggcaaggtgcgtggcttaaagcggatatgtttggtgaccgggtcgatcacggcggcagtattaatattctgacctctcaccgcccttcaccgctggcaaagggaaacccgtcgcacagcaatcttgtccagatcgaaaaggtttaaggagtagcccatgaccacacaatatggattttttatcgattccagccgctgtactggctgtaaaacctgcgaactggcgtgcaaagattttaaagatcttggcccggaagtcagtttccgccgtatttatgaatatgctggcggcgactggcaggaagataatggcgtctggcaccagaacgtgttcgcttattatctctccatctcctgtaaccattgcgatgaccccgcatgtacaaaagtctgccccagcggcgcaatgcataagcgtgaagatggctttgtggtggttgatgaagatgtttgtatcggctgccgctactgccacatggcttgcccgtacggcgcgccacagtacaatgctgaaaaagggcacatgacgaagtgcgatggttgttattcgcgcgtcgccgaggggaaacaacccatatgtgtcgaatcctgcccgctgcgtgcacttgagttcggtccaattgaagagctgcgccagaagcacggcactcttgctgccgtcgcgccactgccgcgcgcgcatttcacaaaacccaatatcgttatcaaacctaacgccaacagccgcccgaccggcgataccactggttatctggataatccggaggaagtgtaaaatgggaaatggatggcatgagtggccactggttatctttaccgtattgggtcaatgcgtagtaggcgcgctgattgttagcggaattggctggttcgccgccaaaaatgacgcagaccgtcagcgtattgtccgtggcatgtttttcctctggctgttgatgggcgtcgggtttattgcctctgtcatgcacctgggatcgccactgcgggcgtttaactcgctgaatcgaatcggagcttctggtctgagtaacgagattgctgccggttccatattttttgccgttggcggattatggtggctggtggcagtcatcggtaaaatgccgcaagcgttggggaaactctggttacttttcagcatggcgctcggcgtcattttcgtctggatgatgacctgcgtgtatcaaatcgacaccgtgccaacctggcataacggttacactacgctggctttcttcctgacggtattgttgagcggtccaatacttgctgccgcaattctgcgggcagcttgcgttacatttaataccacaccatttgccatcattagcgttctggcgctgatcgcttgtgccggggtgattgtgctgcaaggtttgtctctggcgtctattcactcatccgtgcaacaagccagcgcactggtaccagattacgcctccttacaggtctggcgtgtggtattgttatgcgcaggtcttggatgctggctttgcccgctcattcgtcgccgtgaacctcacgttgccggacttattctggggctaatcctcatacttggcggtgagatgatcgggcgtgtgctcttttatggcctgcacatgacagtaggaatggctattgcaggttaacaaattggtgcggggcaacccgcacatttcaggatgttaggaatgacccatttttcacagcaagataatttttctgtcgcggcgcgcgtgttgggcgcgctgttttattacgctccagagagtgcggaagccgcacctctggttgcggtactcaccagtgacggctgggaaactcagtggcctctaccagaagcgtcattagcgccgctggtgacggcttttcagacacagtgtgaagagactcacgcccaggcctggcagcgtttgtttgtcggcccgtgggcactgccgtctccgccgtgggggtcggtctggctggatcgcgaatctgtgctgtttggcgattcaacattggcacttcgtcagtggatgcgcgagaaaggcattcagtttgaaatgaagcaaaacgaaccggaagatcattttggttcactgctgttgatggctgcgtggttggcggagaatggtcgccagacagaatgcgaagaattgctggcatggcacctttttccgtggtcaacacgttttcttgatgtttttatcgaaaaagcagaacaccctttctaccgtgcactgggtgaactggctcgcttaacgctggcgcaatggcaatcacaactgttaattcctgtcgcggttaaaccgctgtttcgataggagcaccgtaatattgccggatggtgacgattacgcgcaatccggcaataataggttacagtgtcacgtttttttatctcttaaagcacgcactgcttttgcggctggcctcttttgccgcaaaatagtcgcccgtgtttcattgcccatttctgctcatgcatcatctacacatctatccggatctgcgcactatgttccgccgtctgcttatcgcaacagtcgtcggtattctcgcggcctttgccgttgccgggtttcgtcatgcgatgctgctactggagtggttgttcctcaataatgactccggcagtctggtcaatgcagcgacaaacctttccccctggcgacggctgctaactccggcgctcggcggactggcggcgggtttgttgctgatgggctggcagaaatttacccagcaacgccctcatgcgccgaccgattatatggaagcgttgcaaaccgatggtcagtttgattacgcagcaagcctggttaaatcgcttgcctctctgctggtagtaaccagcggcagtgcaattggtcgcgaaggtgcgatgattcttttagctgcccttgccgcctcctgttttgcccaacgttttacgccacgccaggagtggaaattatggatcgcctgtggagctgcggcgggaatggctgcggcctatcgcgccccgcttgctggtagtttatttatagccgaagtgctgtttggcactatgatgttggcctctctcggcccggtgattatttccgccgtcgtggcgttgctggttagcaatcttattaatcattgcgacgcgttactctacagcgtacaactctcagtaacggttcaggctagtgactatgcgctgattatcagtacaggtgtgctggcaggtctgtgcggaccactgttgttaacgttaatgaacgcctgtcatcgtggatttgtgagtctcaaacttgcgccgccctggcaactggcactgggcgggttgatcgtgggtctgctttccctgttcacacctgcagtgtggggcaacggctatagcaccgtacaatcctttttaaccgccccgccactgttaatgatcattgccgggatcttcctttgtaaactgtgtgccgtgctggcgagtagtggttccggcgcgcccggtggtgtctttacaccgacgctatttatcggtcttgccattggcatgttgtatgggcgtagtctgggattatggttccctgatggcgaagaaattacgcttttactcggattgaccgggatggcgacactgttggcggcgaccacgcacgcgccgattatgtcgacgttgatgatatgtgaaatgaccggggagtatcagctactccccggtttattgattgcctgcgtaattgcgtcggtaatctcgcggacgttacaccgtgactctatctaccgccagcacactgcgaagcatagctaagcggatgtattgccccagttcacgctgttcggcgcgcggcagataaggcagttcaccaatgagcggtgccggaagttttttaccaagcacatcaatgatttccgcataatgcgcaagtcctggattgattcggttagccacccagccaatgagcggtagcccgtcgttggcgatcgcctgagctgttagcagtgcatggttaatgcaaccttcctgaataccgacaaccatcaacaccggcagttgttcctgcaccacccattcagagagcggacgcaaatcattcatcagactgcgccagccgccagtcccttctaccaccacatgatcgactttatcggtcaggtttgccaggccgtttgaaatgagggtgtaattgattgggcaactgtgcgccacgctactttcttcttcgcttaacgcgataggattaactgcttcataaggcagttcgatggttgaaacactctgcaacaccagggcatctttattacgcagcccttcgggtgtctctttgctccccttcgctacgggtttatatcccgcaaccgtttttccctgggaggctaacgcttgtagcaatgcgcgggaaaccaccgttttccctacagaagtgtctgtaccggtaataaagaaacgcttcagcatcactaactccaccgttatgcttcacaaatataaaccaggaaaataattaaccttgaaagtctaagttatgctttcctggcccaaattgagatagcgcaaattttggtagaacagttaaaaaatgttaaccctgcaacagacgaatcaacaaagaaccgttatacatcgcgtcttttaccagcgcagcccctgccatcgtgccctggttagaaaactgagtactctcaacgctaatgtgctgactatacgcaggaagggcctgctgacggatgctatctgagatgaccgggaagaggatatctgccgctttacttaacggtgagccaatcagtattttttgtgggttaaataaattcaccatgatggcaagaatgcgccccacatgcgcgcccaccccggtaatgatgtcttttgccaacagatcgccgcgcaatgccgcctgacacaatgagtccacggttaacggttgtccatgcaacatcgagctcatggattgattgagacgcagctgtgccagctcaagaatactgtccacactggcgatggtttcgaggcagccgtgattcccgcaataacaacgtttcccatacgggtcgacctgtgtgtggcctatttccacgagactactgctgcctgcgtgtagcagatgaccatcggtaatgacgcccgcccccacgttgtgatcgataaccacctgaatcacatcgcgcgccccgcgtgaggcaccaaacaaggcctctgccatcgtccatgcgctgatatcatgctgaatataaaccggaacgccggtatgctgctccagagcctcgccgagcggcatctcttttacatcctcgtagaacggcatgcgatgtacaatgccattttccgtatcaataattcccggcagggttatggcaatcgaagttagacgctcaagttttttctggtggcggataaaaaactgatcgatatgggaaatgatacgatccagcaatggcgagtcatcttttaacgccagttcctgcgactcttccaccaccagtttgctgctcagatcgcgcagagcaaggaaaatctccccgcgactaatgcgcagagaaagatagtgccaggcttcagtttcaaccaccagccccaccgccggacggccacggttccccgcttctttgatttccagctcttgcaccaggtgtgcttcgagcatctcacggacaattttagtgatactggcaggagccagctgcgccagacgggaaagatcgatacgcgagactggaccaagctgatcaatcaggcgatataccgcgcccgagttggtctgctttatttgatcaatgtgcccaggctggttttcagtaaccaccgcatactccctatattttcgcgctccgaaataatctgtaggctatggtgaagcacttcaatacgtgtcgtcaaatttttacttaggcatgtgattaacagcacatttttcgggctttttcgctgaaatttccctcacctgagagcattcagcagatgaatacgaaagttacgcgcagccggactttgttcatgatgtttcggccagaccaaccacatttcagaaaccgcatcctcttcagcaatcggcacccagcgcatttcgttgagctgaacacgtttaaatgacgcaggcaaaattgaaacacccagaccggcggaaaccagaccgatgatggtcattgcctcgcccacctcctgagtgatgacgggcgtcaaatggtaacgtcgcatcagcccgagaatatcgtcatacagccctgtcccgacgtgcggatcaaaaaagacaaagggttctttcgccagttcagccagcgttacattcgggttatttgccaggggatgatcgtgcgggatcatcgccataagcggttcatggacgatgactgcgtgttcaagcgtctccggtaacgctgtgttacgcagcaatcccatatccagcgttccttcaatgagcggagcgatttgctcacgagtgttcatttcgcgggtttgtaaatggacatcaggataatcacggcgaaacagcgataacgtatcggacaccgcccgaataaaaggagcggacgaagtaaaaccaatgcgcaactcccccgcttcaccctgatgcagcctttcagcgcgagcggcagcgtcatccaccatagacaggatttgccgactatctgcaagaaactgttttcctgctgccgtcagcaatacactgcgattggttcgtgccagcagtcgggcaccaatttgttgctccagcgcctgaatctgctgacttagcggcggttgcgaaatattcaggcgggcagcggcgcgcccgaaatgcagctcttccgcaacagcaacaaagtaacgcagatgacgaagttcaatattcatatttaaaacatcttatttgagattattaatatattagacagaacaattcgattttcctactctatgtataagcctgatccacaggcatatttagcaaggatttcaagtgagccgtactacaactgttgatggcgctccggcaagcgacactgacaagcaaagcatttctcagccaaatcaatttattaaacgcggtacgccgcaatttatgcgcgtcaccctggcgctgttctctgccggactggcaacatttgcacttctctattgtgtgcagcctatccttccggtgctttcgcaggagtttggcttaacgcccgcgaacagtagtatttcactgtccatttccacggcgatgttggctattggtttgctgtttactggccccctatccgatgccattggtcgcaaaccagtgatggtcacggctctactgttggcctccatttgtacgttactttcgacaatgatgaccagctggcacggcattttgattatgcgcgccttgattgggctttcgttaagtggcgtggcagctgttggcatgacttatcttagcgaggaaatccaccccagtttcgtggccttttcgatggggttgtatatcagcggcaactcaattggcggcatgagcggacgcttaattagtggtgtcttcacggactttttcaactggcgaattgctctggcggcaatcggttgtttcgcgctagcctcggcgttgatgttctggaaaatcctcccggaatcacgccattttcgcccgacttcgctgcgacctaagtcgttgtttatcaactttcgtctgcactggcgtgaccggggattaccgttattgttcgcagaaggctttttgctgatggggtcgttcgtcacgctgtttaattacatcggctatcggttgatgctctccccctggcatgtcagtcaggccgtggttggcttattatcgctggcttatttgaccggtacatggagctcacccaaagccggaaccatgaccacccgctatgggcgcggtccagtgatgttgttttcgacgggggttatgctgtttggtttactgatgaccttattcagctcgctgtggctgatctttgccggaatgttactcttctcagcaggattcttcgcagcccactcagttgccagcagctggatcggcccccgcgcaaaacgcgctaaaggccaggcctcctcgctgtatctgttcagttactatctggggtcgagtattgccgggacgctgggtggtgttttctggcataactatggctggaacggcgtcggcgcatttattgctctgatgctggtcattgctctgctggtcgggacgcgtttgcatcatcgtctgcacgcctgaaaaaataagtccggactgcggtaaatacccgtccggacttattgcttgctcaaaccaacgttaatagccatcctaaaatagacgaagcgccagccaattcccgcagcgcgtctagcgtcatcaggattataagtacccaaataaacggattcattttgctgtgtgtcatttattactgatgcgcagttattctaccgctttgtaagtagtaaaatagttaacccaatcaagactactattattggtagctaaatttcccttaagtcacaatacgttattatcaacgctgtaatttattcagcgtttgtacatatcgttacacgctgaaaccaaccactcacggaagtctgccattcccagggatatagttatttcaacggccccgcagtggggttaaatgaaaaaacaaattgagggtatgacaatgaaaaaagtattagctctggttgttgccgctgctatgggtctgtcttctgccgcctttgctgcagagactgcgaccacacctgctccgactgcgacgaccaccaaagcagcgccggcgaaaactacacatcataaaaaacagcataaagcagcacctgcccagaaagcgcaggcggctaaaaagcatcataaaaatgcgaaagctgaacagaaagcccctgaacaaaaagcgcaggcagcgaagaaacacgccgggaaacacagccatcagcaaccggcaaaacctgctgcacaacccgcagcgtaagttttcaacagtaatgctggcgcgccccctcgcgcctgaaaattacggtgctaagcgggtaacgtttagcaccgcctttagcggagggtagtatggtgggccgttatcgctttgagttcattcttatcatccttattttatgcgcactgattgccgcccgtttttatctttcctgactgtagttatctgattttactcccactttcatcccgtcccgtctatagtatttatgagggtttgcttttaataatcataattactcaccagagtgtgatatgcgtacaaccattgctgtagtgttgggtgcaattagtttgacgtctgcttttgtgtttgcagataaaccagacgttgccaaatcggcaaacgatgaggtcagcaccctgttttttggtcatgatgatcgtgtgccagtgaatgacacgacccaatcaccgtgggatgcggttgggcaactggaaacggccagcggcaatttatgtacggcgacgctgattgcacccaatctggcattaacggcaggacactgtttattgacacctccaaagggtaaagccgataaagcagtggcgctgcgttttgtgtcaaataaaggtctttggcgctatgacatccacgacatagaaggccgcgttgatccgacactgggaaagcggttaaaagcagatggggatggttggattgtacctcccgcagccgcgccgtgggacttcggattgattgtgctacgtaatcccccttctggcattacgccgttgccgttatttgagggagataaagccgcgcttaccgccgcattaaaagcggcaggtcgtaaagtgactcaggcgggataccctgaagatcatctcgatacgttgtacagtcatcaaaactgtgaagtgactggctgggcgcaaacgtcggtgatgtcacatcagtgcgataccttgccgggtgacagcggttcgcctctgatgttgcataccgatgacggctggcaattaattggggtgcaaagttcggctcctgccgcgaaagatcgctggcgcgccgataaccgggccatttctgttaccggttttcgcgacaagctggatcaactgtcgcaaaaataatgttcaaacgctgcccgacagcgcgggcagcgtgttcatcaggcaagtttcaccatgatcattccagccaacagcaagaccaggccaatccagcctttacgatttaaccgttgaccaaacaagatccaacctgcggctaacgtggcggcaataccaaacccgccccacaatgcataagcgacagacaagtcgatccctttaacggcctgagaaagcgcactaaaggcagccagcaccgccgccagggagagcaagccaaatattttgcgacgaaagccgtcagaaaatttcaaaaagacgttagcaacgatttccagcacgattgccaatgccagccaggcggcgtgaacccattcaaactgcgccatggttcacctccagttcaggtttacgcgctttacgggtacctgattttatcaacacaatcccggcgaccagggtggttaacccggcaattttcatcagcgataaactttcgtcgaataacaaaacgctaaacaaggtaataaataaaataccgataccttcccacaacgcataagctacgcctaaggcgatttttttaacggcgaaagagagaaatatatacgacagagaaatcatcaccagcattaaaataaagccgccatttccctcactgacgctcgcccatttcattgacagcgtaccggtaatttctgtagcaatagccagacctaataaaatccaataaatatacattgtccttctcctgcaagagaattattttaattttcgcttaattcagcgaaaccaaagtaaagtggtcaagccccgcgcatagggcaagcttaggcagaagaaaggactaaagcgcgttgcgccagtgctgctcacctacgagcaagatagtggatgaggtacgaagatgggtaaatgtagaaaataacgtcctgaacaaattgtccataatattacaattatccgcagtgttgcttctcgtcatcgcggatgataattgtcctcggtagttgaacacgcctgatttgtatcatagcttaagaattaactcaaaatattttcacttctttacctgagcggtttgattttcgttatgatgacggagcgaaaaagacattattattagcaaaggaagaaaaaacggggacaagcatggcaaagccgatcatcacgctcaatggcctaaaaatcgtcattatgttgggaatgctggtcattattctctgcggtatccgttttgccgccgagatcatcgtgccgtttattctcgcattatttattgctgttattcttaacccgctggtgcaacacatggtccgctggcgtgtgccgcgtgtactggcagtgtcgattttgatgaccatcatcgtgatggcgatggtgttgctgttagcttatctgggttccgcgctcaacgagttgacgcggacgttaccgcaatatcgcaactctattatgacgccgctgcaagcgcttgagccgttgttgcaacgcgtagggattgacgtctctgttgaccaactggcgcattacatagatccgaacgcggcgatgacgttgctcaccaacttattgacgcagttatctaatgccatgtcatcaatctttttattgctgctgacggtgctgtttatactgctcgaagtgccacaattgcccggaaaatttcagcaaatgatggcgcgtccggttgaagggatggcggcgattcaacgtgcgattgacagtgtttctcattatctggtgctgaaaacagccatcagcatcatcaccggcctggtcgcctgggcgatgctcgccgcactcgatgttcgcttcgcttttgtctggggattgctggcctttgcgcttaattacatcccgaatattggttcagtcctcgcggcaatcccccctatcgctcaggtactggtgtttaatggcttctacgaagcgttgctggtgctggcgggatatctgctgattaatctggtcttcggcaatattctggagccgcgtatcatggggcgtgggctggggctttccacattggtggtatttttgtcgttgattttttggggatggttgttaggaccggtgggtatgctgctttccgtgccgttgacaattattgtcaaaattgcgcttgaacaaacagcgggaggtcaaagcatcgccgttctgttaagcgatctcaataaagagtgacggcctcagcagaggccgtcagggttacagagctttcaggattgcatccacgctggctttggcgtcaccaaacagcatgtgggtgttttccttgaagaacagcgggttttgcacaccagcatagccagtgttcatcgaacgtttaaagacaatcacgttctgcgctttccacacttccagcacaggcataccagcaatcggactcttcggatcatcctgcgccgccgggttaaccgtatcgttagcaccaatcaccagtacggtatcggtatcagcaaagtcatcattgatctcgtccatttccagcacgatgtcatacggtacttttgcttcagccagcaatacgttcatatgtccaggcaaacgccccgcgaccgggtggataccgaaacgcacattaataccacgagcgcgcaatttctcagtaatttcagcgacaggatattgcgcctgcgcgactgccatgccgtaccccggagtaatgatcactgaatgggagtttttcagcagttccgctgtctcttctgcggtgatttcgcggtgctcacccacttcctgatcatcgccagtagaagagccgtcggtgccgaaaccacccgcaataacgctgataaaggaacggttcatcgccttacacataatgtaagaaaggatagcccccgaagaaccgaccagcgcaccggtcacaatcagcaggtcgttgctgagcataaagcccgcagccgcagccgcccagccggagtacgagttcagcatcgacaccaccactggcatatctgcaccaccgatggaggcgactaaatgccagccgaataccagcgcaattgcggtcattatcagcaatgccagcacttgcaggccgacgctgtccgtgcgaacaaatacaatcagcagcaggaaggaaacgaccagagccgccaggttcattttgtgacggtttggcagcatcaatggtttagacgaaatcttgccacacagtttgccgaacgccaccaccgaacccgtgaacgttaccgccccgatgaagataccgaggaacacttccgtcaggtgaatattgaccagaatcggtgccattcccgcgtcatgatgcagatagctgttaaagccaaccagcactgccgccagacccacgaagctatgcaggatcgccaccagttctggcatttcggtcatttcaactttcttcgccagacggataccaattgccccaccaatgaccatcgccagcaagatccagccaacattacccgtatccggtccaaaaatggttgcgattaacgcaatcgccatcccggcgataccgaagttgttaccctggcgagacgtttcatgtttcgaaagaccggccagactgaagataaacaggatcgcggcaacaatgtatgcagctgtaactaatcctccagacatatgttaccccttaatttttgcggaacattttcagcatgcgctgagtcacggtgaagccaccgaaaatattaatgctggctataagcaccgcgataaaactaaggaagctaacccagccgccctggccaatctgcaacagtgctccgacaacaataatccctgaaatcgcgttggtgaccgacatcaacggtgtatgcagcgcgtgcgatacattccacaccacgtaataaccgacaacgcaggccagcgcgaaaacggtgaagtgcccaagaaactctttcggcgcaacgcttgccagccaaccgaaaaggatgattgccagcgccatcaacgcgtatttacgccacggtgagcaggcacatttttcctcagttttcacttccggtgccgctttttgtgccgcctgcggctgagctgatacctgaatcggcggtgccggccaggtaatttcgcccgcacggatcacggtcacgccgcgaatcaccacatcatcaaaatcaacagtgatattgccgtctttctctttgcacaacagtttcagcagattaacgaggttagtaccgtaaagctgtgaggattgcgtcggcaggcggcccggaagatcggtataaccaatcactttgacaccattttccgtagtgaagatttcacccggcacggtgtattcacagttgccaccgttttgggctgccaggtcgacaatcacactgcccgctttcatggagtcaaccatttcacgggtaattagcttcggcgctggtttgcctggaataagcgcggtggtgacaatgatatcgacctcttttgcctgggcggcaaagagttccatttccgctttgatgaacgcgtccgacatcactttggcatagccatcgccgctgcccgcttcctctttaaaatccagctcgaggaattccgcgcccatactttgaacttgttctttcacttccgggcgggtgtcgaatgcacgcacaatcgcgccgagactgtttgctgcgccaatggcggccagacctgcaacacccgcaccaatcaccatcacttttgccggtggcactttcccggccgcagtaatttgcccggtaaagaagcgcccaaattcatgtgccgcttcaacaatggcgcgataaccggcgatgttcgccatcgagcttagtgcgtccagcgattgtgcgcgtgagatacgcggcacagagtccatcgccatcacggtcacgttacgttccgcaagtttttgcattaattccggattctgcgcaggccagataaaactcaccagcgttgtcccaggattcagtaacgcaatttcatcatctaacggcgcattgaccttcagaatgatctctgactgccagacgctattcccttctacaatttcagcgcccgcttgcacaaacgctttatcgtcaaaacttgccagttgacccgcgccgctctctaccgcgacggtaaaacccagtttcagcagctgttccactgtttttggcgttgctgcaacacgggtttcattggttaaccgttctcttggtatgccaattcgcatgatattcccttccatcggttttattgatgatggtttgcctgtgtcaggagccacacaagctgctcatgtacgagctaaatgttactccgttaaaataaattagtaacaaacgccctataacgtactgaaaattatgcctgtgatctagcgccaaaaatcagtatttcggcgtgaactcgcaaaatattaacgattcagccgtgatagtgggataaacaccttagaacgccggataaagactgataattgtcttcgacggtcgggtaaaacgagacatcgccccggcacgaatcactacttaacattaaattaacttatacaattcagttgcttcagtagtaatgatgctgatacggctgttttttaagcatagacggtcatttgagcaggattaaaattggcttaaggaatgtgatatgaaaaatgacgcagacagttacaccgtttaaatgcaataatcagccacgtttctcgttaataacaataccagtacctggtttgcgcaaggcgaaggattatttttatgaagcttaagaacaccctcctggcgtcggcactgctttctgctacggcattctccgttaacgcagcaacagaactgacaccggagcaagcggcagcggttaaaccttttgaccgtgtagtggttaccggtcgttttaatgctattggcgaagcggtgaaagccgtttctcgtcgcgcagataaagaaggtgccgcctctttttatgttgtcgacacttctgattttggtaacagcggtaactggcgtgtggtcgctgacctctataaagccgatgctgaaaaagcagaagaaacaagtaatcgcgtaattaacggtgttgtcgaactgccgaaagatcaggctgttctgattgaaccgtttgacacggtcaccgtccagggcttctatcgtagccagccagaagtcaatgatgccatcaccaaagcggcaaaagcgaaaggtgcctactctttctacatcgttcgtcaaatcgatgccaaccagggcggcaaccagcgtattactgcattcatctataaaaaagatgctaagaaacgtatcgtccagagcccggatgtgatcccggcagattccgaagcaggacgtgcagctctggctgccggtggcgaagccgcgaagaaagttgagatcccgggtgttgcgactaccgcatcaccaagttctgaagtcggtcgcttctttgaaacccagtcatcaaaaggcgggcgttacaccgtcacgctcccggatggcactaaagtcgaagaactgaacaaagcgaccgcagcgatgatggtcccgttcgacagcatcaaattctctggcaactacggcaacatgaccgaagtctcctatcaggttgcgaaacgtgccgcgaagaaaggtgctaagtattaccacatcacccgccagtggcaggaacgtggtaataacctgaccgtcagcgcagatctgtataaataactattcagttactcctataaggcggcttgatgccgcctttcgcatttttagtcacaaatttccccgcgaccattgcatgcagacacatctcttcgtaaaatcccgcgcttcagtggcaaactccatttttatgcgttttgccctaatatttattcttcttatcacgttttaatcactggatatcgatggaaaagaaactgggactgagcgcactcaccgcgctggtattaagctcaatgctgggcgcgggtgttttcagtctgccgcaaaatatggcggcagttgccagcccggcagcactgctcatcggctggggtattactggcgctggcattttattgctggcctttgccatgctgatcctcacgcgcattcgtcccgaacttgacggcggtatctttacctatgcccgcgaagggtttggcgagctaatcggcttttgttccgcatggggatactggctgtgcgcagtcatcgccaacgtctcctatctggtgatcgttttttccgcgttaagcttttttacggacacgccggaattgcgcctgtttggcgatggtaatacctggcaatcgatagtcggtgcatcggctttattgtggattgttcactttttgatcctgcgcggggtgcaaaccgctgccagcattaacctggtggcgacactggcaaaattgttgccgctgggtctgtttgttgtgctggcgatgatgatgttcaaactggataccttcaagctcgacttcaccggacttgcacttggcgtacccgtttgggaacaggtgaaaaacaccatgctgatcaccctgtgggttttcattggtgtggaaggtgccgtggttgtttctgcgcgtgcgcgtaataaacgtgatgttggcaaagcgacactgctggcggttctctccgctctgggcgtttacttgctggtaacgctgctttcgctgggtgtggtggcacgtcctgaactggctgaaattcgtaacccgtcaatggccggtctgatggtggaaatgatgggaccatggggcgaaatcatcatcgctgccggtttgatcgtttccgtttgcggcgcgtacttaagctggaccatcatggcagcagaagtaccgttcctggccgccactcataaagcattcccgcgcatttttgcgcgccagaacgcacaagctgcgccatccgcctcactgtggttgaccaacatctgcgtgcaaatttgtctggtactcatctggctgaccggttccgattacaacacgttgctgaccatcgcctcagaaatgattctggtgccctatttcctggtcggcgcgttcttgctgaaaatcgcaacccgtccactgcataaagcggtaggtgtcggtgcctgcatttatggcttatggttattgtacgcctctggtccaatgcacttgctgttatccgttgttctgtatgcaccggggctgctggttttcctgtacgcgcgcaaaacgcatacccatgataatgtactgaaccgtcaggaaatggtgctgattggcatgctgttaattgcctcagttccggcgacctggatgctggtgggataacgttcatcccatcgttggatagcaaaggagataacgatgggtaaaacccagcccttgccaatattaattactggcggaggtcgtcgcatcggcctcgccctcgcatggcatttcattaatcaaaagcaaccggtgattgtcagctatcggacacactatccagccattgatggactgattaatgcaggtgcgcagtgtattcaggctgatttttcgaccaacgacggtgtgatggcgtttgccgatgaagtactaaaaagcacccatggtctgcgtgctattttgcataacgccagtgcgtggatggcggaaaaaccgggtgcgccactggccgacgtactggcttgcatgatgcagatccacgttaataccccatacctgctcaaccatgcgctggaaagattactgcgtgggcacggacacgccgccagcgatatcattcactttaccgattatgtggtggagcgcggtagcgacaaacatattgcgtatgctgcaagcaaagcggcactggataatatgacccgctcgtttgcccgcaagctggcaccggaagtgaaagtgaattctattgcgccatcgctgatcctgtttaatgaacatgatgatgccgaatatcgacaacaggcgctgaataaatcactgatgaaaaccgcgcctggcgagaaagaagtgatcgacctggtcgattacttacttaccagttgctttgtcaccggacgcagtttcccacttgatggcggtcgtcatctgcgttaatgcagctttatccagcatataatcaacacccatgcgcttatcccccaacacgcaacagaaccaacaaaagcggcgggcaagcgcatcattccggtgaaataccacagcgacaccaggtaaacaaaatagggaataatcgaccacatactaaaaatgatggttgcgcgtaaggcttcaatgccgcgttcgctggcaacaatataatgcgcgataagcgcaaaggtcgggaaaagtggaatcagcccggcgatataataatttttcgtttttgctaaaacaccaatcaacagcactaccagcgcaccgagcgcggctttgattaccagccccatctttttaccttaacacttccataacaagtcatcagtagaatacctgatgaaaacttgtttagaaacgattgatagtaagtaaaaacagcgcggtgtattgtgacgtttttatatctaccgtgaatgttatgaacactatcgtatttgtggaagatgatgcggaagtcggttcactgattgccgcgtacctggcaaaacatgatatgcaggttaccgtagagccgcgcggcgaccaggccgaagaaaccattttgcgagaaaatccggatttggtgttactcgacatcatgctaccaggcaaggacggcatgaccatttgtcgtgatttacgcgcaaagtggtctggaccgattgttcttctaacctctctcgatagcgatatgaaccacatcctggcactggaaatgggtgcctgcgactatattctcaaaacgacgccccctgctgttttgctagcgcgtttacgtttgcatttgcgtcagaatgagcaagccacactgaccaaaggtcttcaggaaacgtctctgactccctacaaagccctgcatttcggcacgttgaccatcgatcccatcaaccgcgtagtcaccctggctaacactgaaatctcgctctcgacagctgatttcgaattattgtgggaattagctacccatgccgggcaaatcatggaccgcgatgcattgctgaaaaatttacgcggcgtcagttatgacggactggatcgtagcgtggacgtggctatttcgcggttaagaaaaaaactactcgataacgccgcagaaccttatcgcattaaaaccgtgcgtaacaaaggctatctttttgcgcctcatgcatgggaataagcgatgaaaaaattgtttatccagttttacctgttattgtttgtctgcttccttgtgatgtctctgctggttgggctggtgtacaaatttaccgccgaacgcgcgggcaaacagtcgctggatgatttgatgaacagttcgctgtatctgatgcgcagcgaattgcgtgagatccccccacacgactggggtaagacgctgaaagagatggatttaaatctctctttcgatctgcgtgtcgagccactgagtaaataccatcttgatgatatttccatgcaccgactgcgtggcggcgaaattgtcgccctggacgatcagtacacgtttttgcagcgtatcccgcgcagccactacgtgctggcagttggtcctgttccttatctttattacctccatcaaatgcgattgctggatatcgccctgatcgcttttattgctatttccctcgcctttccggtgtttatctggatgcgtccgcactggcaggatatgttaaaactggaagcagcggcgcaacgatttggcgatgggcatctcaatgaacgtatccactttgatgagggttcgagctttgaacgacttggcgtcgcatttaaccagatggcggacaatatcaacgccttaattgccagcaaaaaacagcttattgacggtatcgctcacgaactgcgaacaccgttagtgcgcctgcgttatcgactggagatgagcgataacctgagcgccgccgaatcccaggcgttgaatcgtgatatcagtcaacttgaagctttaattgaagagctgctgacttatgcccgactcgatcgcccacaaaacgagcttcatcttagcgaaccagacctgccgttgtggctgtcaacgcatctggcagatattcaggcagtaacgcccgataaaacggtacggataaaaacgctcatgcaaggccattatgcggcgttggatatgcgcttaatggagcgcgtgctggataatttgctcaataacgccctgcgctactgccattcaacggttgaaaccagcctgctactgtcggggaataaagcgacattaattgttgaggatgatggctcagggattgccccagaaaaccgcgaacatatctttgaaccttttgttcgcctcgatcccagccggggtcgctcaaccggcggctgcgggctgggactggcaattgtccactctatagcactggcaatgggcggtacggttaattgtggcaccagcgaactgggtggtgcccgcttctcgtttagctggccgttatggcataacatcccgcaatttacctctgcttgacactacgcgcacggtggtcaagtcaccaccactgtgctataaattaaggatgttgtaactaaagtggttaatattatggcgcgttacgatctcgtagaccgactcaacactacttttcgccagatggaacaagagctggctgcatttgccgctcatcttgagcaacacaagctattggttgcccgcgtgttctctttgccggaggtaaaaaaagaggatgagcataatccgcttaatcgtattgaggtaaaacaacatctcggcaacgacgcgcagtcgctggcgttgcgtcatttccgccatttatttattcaacaacagtccgaaaatcgcagcagcaaggccgctgtccgtctgcctggcgtgttgtgttaccaggtcgataacctttcgcaagcagcgttggtcagtcatattcagcacatcaataaactcaagaccacgttcgagcatatcgtcacggttgaatcagaactccccaccgcggcacgttttgaatgggtgcatcgtcatttgccggggctgatcacccttaatgcttaccgcacgctcaccgttctgcacgaccccgccactttacgttttggctgggctaataaacatatcattaaaaatttgcatcgtgatgaagtcctggcacagctggaaaaaagcctgaaatcaccacgcagtgtcgcaccgtggacgcgcgaggagtggcaaagaaaactggagcgagagtatcaggatatcgctgccctgccacagaacgcgaagttaaaaatcaaacgtccggtgaaggtgcagccgattgcccgcgtctggtacaaaggagatcaaaaacaagtacaacacgcttgccctacaccgcttattgcgctgattaatcgggataatggcgcgggcgtgccggatgttggggagttgttaaattacgatgccgacaatgtgcaacaccgttataaaccacaggcgcagccgcttcgtttgatcattccccggctgcacctgtatgttgcggattaacgcccggctttcatactgccgaccatctgttctggccgtacccagctgtcaaactcggcttcgctaagataccccagcgcaagggccgcagcttttaaggtcagcccttctttatgcgcttttttggcgatctccgcggctttgtcataaccaatgtgggtgttaagcgcagtcaccagcatcagcgattcattgagtaattgattgattcgctcacgattcggttcaatacccactgcgcagtgtttgttaaaactttccatgccatctgccagcaagcgcaccgattgcaggaaattgtggatcaccattggacggaagacgttcagttcaaagttaccggaagcgccccccatgttgatcgccacgtcgttccccatcacctgacagcagagcatggttaatgcctcacactgtgttggattcactttccccggcatgattgagctgcccggctcattttccgggattgagatttcaccaattccgcagcgcgggccagaggccagccagcggacatcattggcgattttcatcagtgacgcagccaaccctttcaacgcgccgtgcgcctgaaccagggcatcacaggtcgccagcgcttcaaatttgttcggcgcggtaacaaacggtgcacaggtaatgactgccagttcatctgctacgcgacgcgcatactccggatgggtatttagtccagtacccaccgctgtaccgccaagagccagttccgctacgtgaggcaggctgtattcgatatgtttgagattatgctcgagcatcgctacccagccggaaatctcctgccccagcgttaacggcgtggcatcctgcaagtgagtacgaccaattttgacgatatcggcaaaagcacgggatttctcattcagtgtctgtgtcagggttttaagctgaggaatgagttgcttgcgcagcgccagcagcgccgcaacgtgcatcgccgtcggaaagacatcgttggaactttggcttttgttcacgtcgtcgttagggtgaactttacgttccatcccgcgcacaccgccgagtaattcactggcccggttagccagcacttcgttcatgttcatgttactttgcgtgccggagccggtctgccagatagccagcgggaattcgtcgtcatgctgtcctgccagtacttcatccgccgcctgacgaatggcgctcgctttctcttcagacaacaagcctaaatcttcattaacttttgccgctgcacgcttggttagcgccagcgcatgaatcagtgaggtgggcattttctccgtcgaaatgcggaaatgctccagcgagcgttgagtttgtgcgccccacagcttatctgccgggacatcaatcgcccccatcgaatctttttcgctgcgtactgtattcatgacctgctcctcacctgattaattttttctttctgttttgctttcgttaagcaacttttagctcacttattatttaccatttgataacaaatgtttggtctttcgtgccatgtaaaaaaaccgccccgaagggcggctctgtttatttcacacagcgggtgcattgtgtgagttgtatctgctggaagaagtcatttcctttatcatccacaaggataaacgccgggaaatcttccacttcaattttccagatggcttccattcccagttccggatattcaacacattccaggctcttaatacttccctgcgccaatacagcggccggaccaccgatactgccaaggtagaagccgccgtgttttttacaggcatccgtcacctgctggctgcggttgcctttcgccagcatgatcatacttccgccctgcgcttgcagttgatcgacataagaatccatccgtccggcggtcgttgggccaagagaaccggaggcataaccttccggcgttttggccggacccgcgtagtaaatcggatgatctttgatgtactgcggcagcccttcaccgttatccatccgctctttcagtttggcgtgagcaatatcacgaccgacgataatcgtgccgttaagcgataagcgtgtagaaacgggatactgcgacaactgtgcgaggatctctttcatcggacggttaaggtcaacgcgcaccgcttcgccttctcccgctttgcgcagctcttccgggatatatttgcctggattatgttccagtttttcgatccagatcccctgacggttgatcttcgctttgatattacggtcagcagagcaggagacgcccataccgaccgggcaggatgcgccgtgacgtggcaggcgaatcacgcggatgtcgtgagcgaagtatttaccaccaaactgcgcacccagaccaagattttgcgcttcgatcagcaattctttttccagttccacatcgcggaacgcctgaccgtgctcattcccttccgttggcagttcatcatagtatttcgcggaagccagtttcaccgttttaaggttcgtttctgcagaagttccaccaataacgaacgcaatatgatacggaggacaggccgccgtacccagcgtgcgcatcttctcaaccaggtaatttttcagtttccccggcgtcagtaacgctttggtttcctgatagagatacgtcttgtttgccgaaccaccacctttggcgatacagaggaatttgtattcgtcgccatcaacggcataaagatcgatctgcgctggcagattggtgccggtattcacttctttatacatatccagcggcgcgttttgcgagtagcgcagattatcttcgatataagtgttatagacaccgcgcgccagcgccgcttcatcaccaccaccggtccatacacgctgcccttttttaccaacaataatcgcggtgccggtatcctgacaggttggcagaacgcctttcgccgcgatgtcggagttacgcaggaattgcagcgccacatatttatcattttcgctggcctccgggtcacgcagaatgtcggccacctgttgttggtgcgccggacgcagcatgaacgacgcatcatgaaacgcctggcgcgccaacagagttaacgcttcgggtgcgactttcaaaatctcctgcccttcaaattcagatacgctaacgtgttcgctggttagcaggtaatactcagtatcatcttttttgagtggaaaaggagcctgataatgaaagggtttgtttgacattgttctctcacttactgcctggtttggttatgctctgggcgggtgttccgttgccctgttaaaagcgagtaacaatatcctacacacttttttaacaaaaactgagactagtacgactttttgcggctccgggttacttcccgtaggattcttgctttaatagtgggattaatttccacattaaaacagggattgatcatgcaaaaactcattaactcagtgcaaaactatgcctggggcagcaaaacggcgttgactgaactttatggtatggaaaatccgtccagccagccgatggccgagctgtggatgggcgcacatccgaaaagcagttcacgagtgcagaatgccgccggagatatcgtttcactgcgtgatgtgattgagagtgataaatcgactctgctcggagaggccgttgccaaacgctttggcgaactgcctttcctgttcaaagtattatgcgcagcacagccactctccattcaggttcatccaaacaaacacaattctgaaatcggttttgccaaagaaaatgccgcaggtatcccgatggatgccgccgagcgtaactataaagatcctaaccacaagccggagctggtttttgcgctgacgcctttccttgcgatgaacgcgtttcgtgaattttccgagattgtctccctactccagccggtcgcaggtgcacatccggcgattgctcactttttacaacagcctgatgccgaacgtttaagcgaactgttcgccagcctgttgaatatgcagggtgaagaaaaatcccgcgcgctggcgattttaaaatcggccctcgatagccagcagggtgaaccgtggcaaacgattcgtttaatttctgaattttacccggaagacagcggtctgttctccccgctattgctgaatgtggtgaaattgaaccctggcgaagcgatgttcctgttcgctgaaacaccgcacgcttacctgcaaggcgtggcgctggaagtgatggcaaactccgataacgtgctgcgtgcgggtctgacgcctaaatacattgatattccggaactggttgccaatgtgaaattcgaagccaaaccggctaaccagttgttgacccagccggtgaaacaaggtgcagaactggacttcccgattccagtggatgattttgccttctcgctgcatgaccttagtgataaagaaaccaccattagccagcagagtgccgccattttgttctgcgtcgaaggcgatgcaacgttgtggaaaggttctcagcagttacagcttaaaccgggtgaatcagcgtttattgccgccaacgaatcaccggtgactgtcaaaggccacggccgtttagcgcgtgtttacaacaagctgtaagagcttactgaaaaaattaacatctcttgctaagcttattaaaggcttataacaccttcaggcggccagtccgcctgatttcattttatggataatcattatgaataaatcgctggtagcggtaggcgtcattgttgcgctaggcgtagtctggacaggcggcgcatggtatacaggcaagaagattgaaacccatctcgaagacatggtcgcgcaggcgaacgcgcaactcaaactgacagctcctgaatccaacctggaagtgagttatcaaaactatcatcgcggcgtattcagcagccagttgcaactgttggtgaaacccattgccgggaaagaaaatccgtggattaaaagcggtcagagcgtcatcttcaacgaatcggttgatcatggtcccttcccgcttgcccagcttaaaaaactgaacctgatcccgtcgatggcatcaattcaaaccacgctggttaataacgaagtaagcaaaccactgtttgatatggcaaaaggtgaaacgccttttgagattaactcgcgcattggttacagcggtgattccagttccgatatttcgctcaagccactgaattacgagcaaaaggatgaaaaagtcgcctttagcggcggcgagttccagttaaatgctgacagagacggcaaagccatctccctttccggggaggcgcaaagtggtcggatagacgcagttaacgaatacaaccagaaagtgcagttgacctttaataatctgaataccgacggttccagcacgctggcaagttttggtgagcgtgtaggaaatcaaaaactgtcactggaaaaaatgaccatttcagtggaaggcaaagaactggcactgctggaaggcatggagatcagcggtaaatcggatctggtcaatgacggtaaaacgatcaatagccaactggattactcgctaaacagcctgaaggtacagaatcaggatctgggcagcggcaagctgactttaaaagtcggccagattgatggtgaagcctggcatcagtttagccagcaatataacgcgcaaactcaggcgctgctggcacagccagaaattgccaacaaccccgaactttatcaggagaaagtgacggaagccttctttagcgccctgccgctgatgctgaaaggcgatccggtgattactatcgcgccgctaagctggaaaaacagtcagggtgaaagtgccctgaatctgtcgctgttcctgaaagatccggcaacgactaaagaagcgccgcaaacgctggcgcaggaagtagatcgttcggttaaatctctggatgcgaaactgaccattccggtggatatggcaactgagtttatgactcaggtagcgaagctggaaggttatcaggaagatcaagcgaaaaaactggcgaaacagcaagttgaaggtgcatcagcaatggggcagatgttccgtctgaccaccttgcaggacaataccatcaccaccagcctgcaatatgctaacggtcagataacgttaaatgggcagaaaatgtcgttagaagattttgttggcatgtttgcgatgccagctcttaacgttccggctgtaccggcaattccgcagcagtaattcacggccaaaacgccggagaattttcactccggcgttttcatctgaaaacaaaccagagattgcctgatgcgctacgcttatcaggcctaccttttcctgcaacactttgaatttatgagtttttgtaggctggataaggcgtttacgccgcatccggcataaaaaacgcgcactttgtcaacaatctgaaacgccggagatttttctctccggcgttattttttacttcagcataaagtcatactgaatactcattttcacatcccagtaattcaggcgatcgcccagcgtactgccatcgcgcttttcccgccctttatcggcagcaagaaagaaattcatcccttgtaacggcccttcgctgacccgatagttcataccacctaagatacccgtgccttcaatccgcacatctcgtttactggattcatagccgcgagtcacaatcggtgcaaatgtcagcgtaaattgcggcgttaaacgatagttgacgcccaattgccaggactgcattccttcacggttacgatcaagacttaatgaaaagggatagccaatgtcggtatccaccacggcaccattcattgcatggcgcaaataaccaccactgccaaatacacttccccacggcgcattccaggtcaattgtccactaaccaacgccgtttcattgggctggctggtattacgacttaaaccttcgagctgcgcgtaaaagccgagcaactcccctttcaacgtataattcgggtcgagcggtatgcttttctcgagaatactttgtatctgattggaaacatctttctgtaccgatgcccccagagaatagcgactggtatcatcatgccaactggcggctaaaaaagaacgtgcgcgatgtttatcgtattttcccgtctggctgttatacaccccttcatcacgaataccggttgttgaatcagtccataaaaatactcgtgaacgccacattccccacagatcaatatttggtgttaaagcccaataacctaatgctccttcagaaactgtcggtaatgtacgttgcgaactgccagccattaacggaatacgataaggtaagctaccataactataatccgtcccgaagcgacctaatttaagcaggctattttcactgggttttatttttactgcccccagggcaaagccaaaacctttatcaccatcaagataccaccgggtactcatatcagcacgagcacctaatttataaacataatacgccccgccttcaacgccaataatattggaataataaccactattgaaatcgagcaatcctccctgtacccatgcgtaaatatctcttcccgcgccagcactgggcttatccgccctgcgcaattcgtttttcagtctgatgcgtagtcccgcttcatcgtcagccagttgcgccgcataagcagaggtaaggccagaggcagccgtcaggcaaataacggccatggccactatttttctcatagttgcacctttgatgttctgattatttttattgaatattaattagtgatatcgctgattaattgctgctgcacttttttacgattatcaatttcaaccacgatttctttgaattttttatccgtgagcggataaaaccagataataacgaatgccagtagcataaatccgcaaggtactaaggcaattgatgtgcggatgcccataataacttccggcgtttgcacctgattggcgatatatccgcttaaccccaaaataaaggcaggaattgaacctccgattgcctgaccgcatttacgggtaaatgagaatagtgaataggtgagcccttcaattcgcacgccggtcaggtattcaccgtattctacggtatcagcttccagcgcccacatcacggtcatggtaacgccctgaccaattgaagcgatggccaacgcaaccaacgccaccggcagtgaccagacggaaacccagaagaacagcagataaccgcaggttcccagcaaagcgccaatcaggaaggtattctttttaccgatcctcgcgaccatccccggcaccagcggtgccgatgccacagtaccaaccaggttttgcaccagtaccagcacagtgaacagcccggtatcatttaacacatagcgcacgtagaacaacgacgaggcgctgaccgcaaaggtcgaaatcagcacacacagcgcaccgatgcacaacataaacagcgggcgattccgtttcagggtttgcagactgatattcaatgacggctgcgcaacgatacgtaccacattctcacgcgtcgatttgaagcagatgaagtaaagcaccattccggcaatcgccagcacaattgtccagaaatggtataccgacaccatctcttccgggctggagttcttaatgctcggtcctatcagaaatgccaggcagacaaaggtcaatgaagcggcaatcccacgagccgcgcccagacgggcgcgggattgtggttgttgggtcatcgcggtagcaagtgaaccataaggaatattcaccaggctgtagcaaagcccgaggcccatgtaggtcaaatatgcatacaccactttgctaccatggctccagtcggtcggcacccagaataccagcacgctgaagatcattaacggcgcagtaccgaagagtaaaaacgggcggaattttccccagcgggtattcacactgtccaccactcgtccggcaaagacgtcggcgaaggcatcgaatacccgcaccagtaacagcatggtgcccgccgcagcggcaccgacgccagcgacgtcggtgtagtaactcaacaggaagagcgcccccattgcgaaggcgaagttattggcgacgtcaccgaggctgtagccgacgatggtgcgccaggagagttgttgattcattgtttgcctccctgctgcggtttttcaccgaagttcatgccagtccagcgtttttgcagcagaaaagccgccgacttcggtttgcggtcgcgagtgaagatccctttcttgttaccgccaacgcgcaatatgccttgcgaggtcgcaaaatcggcgaaattccatacctgttcaccgacgacggcgctgacgcgatcaaagacgcggtgatacatatccagccatgcacactgatactcttcactccacatgtcggtgtacattgagtgcagcccggctaacgtatccacgccgtattcggtgatgataatcggctgatgcagtttctcctgccaggccagaagttctttttccagtaccttctctgccgtttccaaatcgccgctttggacataccatccgtaataacggttcaggcacagcacatcaaagagatcgctgatggtatcggtgtgagcgtcgcagaacattacattgacgcaggtgatcggacgcgtcgggtcgagtttacgcgttgcttccgccagtggcgcgaaatattcccgtgcaccttgcggacgggtatccggttcgttggcaatactccacatcaccacgcttgggtggtttttgtcacgcgctatcagctctttaatcgcctgtaagtgcgcttgctgagtttccccgttgactgcctcttcgctgtacagttctttcggcttgttgcccgcttcgaaaccaatgcctaaagagaggttaaagccgacagcagcagtttcatcaatcaccacgatgccatgttcatctgcccagtcgagcatctcttcagcgtaagggtaatgcgaggtacggtaggagttggccccaatccagtccattaatgcgtggtcgtgcaccatcagcacgttatcgaatcctttgccacgcaagtccgcatcttcatgacgaccaaagccagtaaagtagaacggtttgtggttaatcaggaactgttcgcccttcactgccactgaccggatgccgacgcgaagcgggtagatatcacactctgtctggcttttggctgtgacgcacagttcatagagataaccttcacccggttgccagaggtgcggattcaccacttgcaaagtcccgctagtgccttgtccagttgcaaccacctgttgatccgcatcacgcagttcaacgctgacatcaccattggccaccacctgccagtcaacagacgcgtggttacagtcttgcgcgacatgcgtcaccacggtgatatcgtccacccaggtgttcggcgtggtgtagagcattacgctgcgatggatcccggcatagttaaagaaatcatggaagtaagactgctttttcttgccgttttcgtcggtaatcaccattcccggcgggatagtctgccagttcagttcgttgttcacacaaacggtgatacgtacacttttcccggcaataacatacggcgtgacatcggcttcaaatggcgtatagccgccctgatgctccatcacttcctgattattgacccacactttgccgtaatgagtgaccgcatcgaaacgcagcacgatacgctggcctgcccaacctttcggtataaagacttcgcgctgataccagacgttgcccgcataattacgaatatctgcatcggcgaactgatcgttaaaactgcctggcacagcaattgcccggctttcttgtaacgcgctttcccaccaacgctgatcaattccacagttttcgcgatccagactgaatgcccacaggccgtcgagttttttgatttcacgggttggggtttctacaggacgtaacataagggactcctcattaagataataatactggtcaacctttaatctgattagttaaccaattctgtgttgcacacagttatctgtgagaaacccatggaagagaaatggaaataaaaagaactgacaccgcgatcaaaaaaccaaaaactgcaatacccacagcgtgatatagatcgcattaatctttaaaacagcgttgacagaagccataaaataagcaaccgaacgttcgttcgagcgtattgggaacgataaactctcatgacatatggctacagtgaatattttggggggaattctccgaagccgggaaggataatttttgcacagagaaattacgatatgaaacgcgggcacagttatcaccagcccgccgaaaaagagagagaatcaggatgcggttaagataccgccaatcatcgcgcgtaatccctgagcaaacgacgcttcacgcgccaggtcttccgcttcgatatcggccagtacaccgtaggtcagatccagcagtaaacgtgaagtcattgccgtgttgatgtctgggcttatctcgcctttttgctgggcatcacgcatccgctgggcaacaaattccgtgatcgtcatatgcttatttttaagcatggcggcgacctgtgggttacgcatcccttccgccataatttcaaccaccagcgcccgttgtccaaaggcttcatgggtgagagagacaatggactcgaccatatagtcaacgaaatgaatcccttcaatcggttcccggaaacgggccagcgccctctcctggtcctgtaagataatcgcctgaatcaaggcttctttggagatgaaatggtgatagagcgtcccgggactaatggcgcaagatttacagatggctttcatcgaggcactgtgaaatccattttctgaaaaaatctctctggcagcattgaggatccgggtccgtgtcggttgtgcttcagtctgcatgttatccatcattaaaccattatagttagcgtgaataactagtttaccgcgttgtcaggtgagcgcctatcattgctgttgaatagtgcgaaggcacactctattcgtatacttttcactctgaaattggttagccaatagccgtgatttggctgccagttatttagcagagacgttgatgagtttatcccggtaaacaacacgcacggttgtttaccggtccgttagtgtattaattgagctcctgtaccccaccaccggagacggtgagaatttgtccgcttacccagctcgcagcaggcgagcaaaggaacagcgctgcgttagcaatatcttgcggttggcccagacgtctgatcggcgtgtgctgtaacattttttgttcaatttctggtgtaataacggatttcagggcatcggttaatattgcccccggcgcaatgccatttacccgaatatttttttcacccaggtcaaacgccatatttctgaccagatgactggccgcagctttagatgatgcataggaagtcatgtttatatttttattttctgccgccatagaagtgatggtcagaataacgccaccgccatttttttccatttctggcgcaacaagttgtgacagatggaaaaaagaaaacacattcagttcataagcacggcgaaaatccgccattggcatatcaaacggtttaggtccaccgccaccggcgttgttaaccagaatatcaactttacccagcttactgatagcaaagtctgccagtgcagagagttcctgttcggaagtaatatcacaacggcaggcaaatgcctgaccacccagttgttgaatttcgtctacaacatggttagctgcgtcggcgttaatatcactgaccaccacagatgcgccagctgtcgcgaatgtaatggcgatttctttaccaatacctgcacccgcacctgtgatgatggcgcattttccgtcgagtctcaggttgtcagaattaaacacataaacctcctgtgaacttcagtaaaaataaaaggcaccgcctgtgtgccacattttttatcattaaccttgaggaaaggacactaccaggtatagcagataaagagaggattatttcgctgcaatgagccgggcgggaataataagattgcgtgaatgcgtctcttcatgggtgattttttgcatcatgcgatccgcaagtgtgataccaagttcccgcgctggcgtgctggcccaggtaacaggtatatcatcaagtgtggttggtgtcgcatcggtaaatgccgccagcgaaacctgttgctcaaagtaacgatcgactccgctttccccgctttgccgccctgctttgagcaaaccaaaccatgcccccatcgcaatagtttcgttatagcaaaccacggcactgatggtcgggttatgacgtaaaagcgccgtgatagcttccgcggcttgcttctggctggaagtgcactccaacacccaatcgctatgaaacggcaggccaaattttagtagagttgcacaatagcccccaacccgttctgcacgggttaatgaggaactttgccctcccagccaggcgatccgctgatgcccattgcgaatgagatgctccgtcaacaactgtgcagcctgcatgttgtccgggcgaaccgtatcaacatcatcaagataactggcacgggaagcgaaaatcaccgggatagctttttcttctgccatccgtcgcaggtcatcgctacttcctgcagctccggcaattaccacaccatcgacaccctgattcagtaacagtgaaaaccgctgtgccagctgctcaccgtctttaccgccgtgaagcaaaaaaaccatccgtccctgcgcttccagagcttccgtcaatccggccgtcaattcggcgtaaaacggcgcagataaatcacggacgatcaaaccaatgacgccgctttgcccgccgcgcagcgccgacgcctggcgattgcgcacaaatcccagctcttcaatggcggcgttaacgcgttctcctgtggcggtagagattcgccctttgccactaagcaccagcgaaacggtacttaccgacacgcccgcagccagcgcaacatcatgaatggttatttttttggcggtagccatgcagatgacctactccctgattatgtgacagataaaacgttttaccttttatttatcttatacccgctattatcgttgcgtaatgtgatttatgcctcactaaaatttgataaaacgttttatcttctcgcgcaatttactgaatccagattgttctctacgaggagtcgttttatgacggcgaaaacagcaccgaaagtcacgctgtgggagttcttccagcagttaggcaaaaccttcatgttacccgtggcattattgtcgttctgcggcattatgctcggcattggtagttctcttagcagccatgatgtcataaccctgatcccggtcctgggcaaccccgtgttgcaggctatctttacctggatgagtaagattggctcgtttgcttttagtttcctgcctgtcatgttctgtatcgccatcccgctgggcctggcacgcgaaaataaaggcgtagcggcattcgctggcttcatcggttatgcggtaatgaacctcgcggtaaacttctggttgaccaataaaggcattctgccaaccacggatgccgcggttctgaaagccaataacatccagagcattcttgggatccagtcgatcgataccgggatcctcggtgcggtgatcgccggtattatcgtctggatgctgcatgagcgtttccataatatccgcctgccggatgcgctggcattcttcggcggtacgcgcttcgtaccaattatctcctcgctggtgatgggccttgtcggcctggtgattccattagtctggccgattttcgccatgggtattagcggcttgggccatatgataaacagcgcgggtgatttcggaccgatgctgtttggtaccggtgaacgtctgctgttgccgtttggtctgcatcacattctggtggcattaattcgctttaccgacgcaggcggcacgcaggaagtctgcggtcaaaccgtcagcggcgcactgaccatcttccaggcgcaattgagttgcccgaccactcacggtttttctgaaagcgccacgcgtttcctttcgcaaggtaaaatgcctgcgtttctcggcggtctgccaggtgcagcgttagctatgtatcactgcgcgcgcccggaaaatcgccataaaattaaaggtctgctgatttctggcctgatcgcctgcgtcgttggcggcactaccgaaccgctggaattcctgttcctgttcgtagcgccagttctgtatgtcatccacgcgctgttaaccggcctcggcttcaccgtcatgtctgtgctcggcgtcaccatcggtaataccgacggcaatatcatcgacttcgtggtgttcggtattttgcatggtctgtcaaccaagtggtacatggtgccagtggtggcggcaatctggtttgtcgtttactacgtcatcttccgtttcgctatcacccgcttcaatctgaaaaccccggggcgcgatagcgaagttgccagctcaatcgaaaaagccgttgccggtgcgccgggtaaatcaggttacaacgttcctgcaatcctcgaagcattaggcggtgccgacaatattgtcagcctcgataactgcattacccgtctgcgtttgtctgtgaaagatatgtcgcttgttaatgtgcaggcactgaaggacaatcgggcaattggcgtagtacaacttaatcaacataacctgcaggttgttatcgggccacaagttcagtcagtaaaagatgaaatggccggtctgatgcatactgtccaggcataaggataagatatgttcgatttttcaaaggtcgtggatcgtcatggcacatggtgtacacagtgggattatgtcgctgaccgtttcggcactgctgacctgttaccgttcacgatttcagacatggattttgccactgccccctgcattatcgaggcgctgaatcagcgcctgatgcacggcgtatttggctacagccgctggaaaaacgatgagtttctcgcggctattgcccactggttttccacccagcattacaccgccatcgattctcagacggtggtgtatggcccttctgtcatctatatggtttcagaactgattcgtcagtggtctgaaacaggtgaaggcgtggtgatccacacacccgcctatgacgcattttacaaggccattgaaggtaaccagcgcacagtaatgcccgttgctttagagaagcaggctgatggttggttttgcgatatgggcaagttggaagccgtgttggcgaaaccagaatgtaaaattatgctcctgtgtagcccacagaatcctaccgggaaagtgtggacgtgcgatgagctggagatcatggctgacctgtgcgagcgtcatggtgtgcgggttatttccgatgaaatccatatggatatggtttggggcgagcagccgcatattccctggagtaatgtggctcgcggagactgggcgttgctaacgtcgggctcgaaaagtttcaatattcccgccctgaccggtgcttacgggattatagaaaatagcagtagccgcgatgcctatttatcggcactgaaaggccgtgatgggctttcttccccttcggtactggcgttaactgcccatatcgccgcctatcagcaaggcgcgccgtggctggatgccttacgcatctatctgaaagataacctgacgtatatcgcagataaaatgaacgccgcgtttcctgaactcaactggcagatcccacaatccacttatctggcatggcttgatttacgtccgttgaatattgacgacaacgcgttgcaaaaagcacttatcgaacaagaaaaagtcgcgatcatgccggggtatacctacggtgaagaaggtcgtggttttgtccgtctcaatgccggctgcccacgttcgaaactggaaaaaggtgtggctggattaattaacgccatccgcgctgttcgttaaccccaattgcgcaacgtaaaaaatcgttgcgcaatcgtggatttttaccctgctttgtttttataatggtgcgcacttttatatccagaaaaagagtgcgaccatgattgataccaccctgccattaactgatatccatcgccaccttgatggcaacattcgtccccagaccattcttgaacttggccgccagtataatatctcgcttcctgcacaatccctggaaacactgattccccacgttcaggtcattgccaacgaacccgatctggtgagctttctgaccaaacttgactggggcgttaaagttctcgcctctcttgatgcctgtcgccgcgtggcatttgaaaacattgaagatgcagcccgtcacggcctgcactatgtcgagctgcgtttttcaccaggctacatggcaatggcacatcagctgcctgtagcgggtgttgtcgaagcggtgatcgatggcgtacgtgaaggttgccgcacctttggtgtgcaggcgaagcttatcggcattatgagccggaccttcggcgaagccgcctgtcagcaagagctggaggcctttttagcccaccgtgaccagattaccgcacttgatttagccggtgatgaacttggtttcccgggaagtctgttcctttctcacttcaaccgcgcgcgtgatgcgggctggcatattaccgtccatgcaggcgaagctgccgggccggaaagcatctggcaggcgattcgtgaactgggtgcggagcgtattggacatggcgtaaaagccattgaagatcgggcgctgatggattttctcgccgagcaacaaattggtattgaatcctgtctgacctccaatattcagaccagcaccgtagcagagctggctgcacatccgctgaaaacgttccttgagcatggcattcgtgccagcattaacactgacgatcccggcgtacagggagtggatatcattcacgaatataccgttgccgcgccagctgctgggttatcccgcgagcaaatccgccaggcacagattaatggtctggaaatggctttcctcagcgctgaggaaaaacgcgcactgcgagaaaaagtcgccgcgaagtaacaaaatggatggtgcaaatgcaccatccatttttcatgcaaggcacaaagtcgcgcgatgtttggcggattcgatgcccagctcaatcaactccattacctggattgcctggcttgccggaaccggattttcaccatcgccatttaacgcatcacgaatagccgcatagtaagccggataattcccaggcaccgtcaacagcgtttcttcgacacgttcctcaccttccacgcgggtaagtacgccatcacgcatatcgtagccccagtcttcctgcggtagacgctcgccatttttcagacgttcttcctgtggatcgaggccatatttcacataactgcctcgggatccatgcacgatataccgtgctgactcagcggctgccagcatggtaccgtgtaaaatgactcgccgctgtggataggacaagatggcgtggaaataatcggtcgactgcgctccgggccgtaactgtgccaaatctaccgtcatgctgaccggtaaaccaaaaagcgtaatggcctgatcaagaagatgtggtgctaaatcgtaccagataccgctgcctgggccgccctgttcacgccaacgatcgcgcacctgcggacggaagcggtcaaaatgagactcaaagtaagcaacttcacccagcacgccttccgcgagtaaaccttttagcgtcaagaaatcgctatcccagcgacggttatggaatacagacagcacacgccccaggctttttgccagcgcatccagctctcgcgcttgtgacagtgtcacggtaaagggtttatcaacgaccacatgtttacccgcctcaagcgccgctttggctaacgggaaatgggtatcgttgggtgtaggaatgacaatcaggtctatgttgggatcgttaaacagatgcttcggctcagagacaaccgtaaccgttggccagtcggcttttacttttgtttcatcactgctggagattaccgccagttccagcccgggcgtgcccgcaatcaggggcgcatggaaggttttgctcgcataaccatacccaatcaacccaacacggatgttgtcgctcatgtcattgcctctcattgaagtatgatggctatttgacactatcctttacccacgctcaacagtttaataacctgccagcaataagggatgttgtttaacttaagtcaaaaaaatagcgaattttccaacgacaaaagctaaatatcgcaaaaacctcagtaaaaatcttgctggagctattattgctaagtaacatttaccccctgaagttaatggatcaatcaagagagatgtgggctgtaatgaatcgtcttattgaattaacaggttggatcgttcttgtcgtttcagtcattcttcttggcgtggcgagtcacattgacaactatcagccacctgaacagagtgcttcggtacaacacaagtaagctctgcacttgtggagcgacatgctgcccgtccgggtgcatgttttcacttgtcggatattaaaccaggaatttattatcttgttcgatgttgttggtgattgtcagggatagtaaagcgcgttactcttttcagagcagtttttcatccctgaatatttgccatcagcgcattcttattattgtaataacacaagcgttcacttttggtgaaattttatcatcactaataatacctacccctttggtattaattattttatggaccttttatgactgttcaggactacttattaaaatttcgcaaaatcagttcactcgaaagtctggaaaaactctacgaccatcttaattacaccctgacggacgatcaggaactgatcaatatgtatcgtgctgccgatcaccgtcgcgcagagctggtttctggcgggcgtttgtttgacctcggccaggtaccgaagtccgtctggcactatgtccaataaagaaagtagcgatcggttataaaagccttataataacgcccctaaaattagatttgcctgtttgcgtcgctattctggagaacctatgaccaccacaacgccacaacgtattggaggctggttgcttggcccgttggcctggcttttagtcgctctgttgagtacgacgctggcgttgttgctgtataccgctgcgttatcttctccgcaaacatttcaaacgctcggcggacaagcactgacgacacaaatcttatggggcgtttcttttattaccgctatcgccttgtggtattacacactgtggttgaccatcgctttctttaaacgtcggcgttgtgttcctaaacactatattatctggctgcttatttccgtattgctggcagtaaaagcattcgctttttcacccgtggaagatggcatagccgttcgccagttgctgtttactttgttggcaaccgcattgatcgtcccctatttcaaacgctcgtcgcgggtaaaagcgacgtttgtgaatccgtaataaccttacagttaacctgttgtcgcctgctctggattaacggataataggcggcttttttatttcaggccgaaaaatgactgactacctgttactgtttgtcggaactgtactggtcaataactttgtactggtcaagtttctcggtctctgtccgtttatgggggtttccaaaaaactggaaaccgcgatgggcatggggctggcaacaacgtttgtgatgacgctggcgtctatttgcgcctggcttatcgatacgtggattttgatcccacttaatctgatttacctgcgcaccctggcatttattctggtgattgctgtggtcgtgcagttcaccgagatggtggtgcgcaaaaccagcccggtgctttaccgtctgctggggatttttttgccgcttatcaccaccaactgtgcagtgctcggcgtggcgttgctgaatatcaatctcgggcacaatttcttgcagtcggcgctgtacggtttttccgccgctgtcggtttctcgctggtgatggtgctcttcgccgccatccgcgaacgccttgctgtggctgatgtcccggcaccttttcgcggtaatgccattgcgttaattaccgcaggtcttatgtctctggcctttatgggctttagtggtttggtgaagttgtaatgaatgctatctggattgccgttgccgccgtgagcctgctgggcctggcgtttggcgccattctgggttatgcctcccgccgttttgcggtggaagacgatccggtcgttgagaaaattgacgaaatcttaccgcagagccagtgtggtcagtgcggttatcccggctgtcgcccctacgcggaagccatcagctgtaacggtgaaaaaatcaaccgttgcgccccaggtggcgaagctgtgatgctaaaaattgccgagttgcttaatgtcgagccgcagccgctggatggcgaagcgcaagagataacgcctgcgcggatggtggcggttattgatgaaaataactgtattggctgcactaaatgtattcaggcgtgtccggtagacgccatcgttggcgctacccgtgccatgcatacggtaatgagtgatctctgtacgggctgcaatttatgtgttgatccgtgcccgacgcactgcatctcgttgcaaccggtcgcagaaacacctgactcctggaaatgggatctgaacaccattcccgtgcgtatcattcccgtggaacaccatgcttaagttattctctgcattcagaaaaaataaaatctgggatttcaacggcggcatccatccaccggagatgaaaacccagtccaacggtacacccctgcgccaggtacccctggcgcagcgttttgttattccactgaaacagcatattggcgctgaaggtgagttgtgcgttagcgtcggcgataaagtattgcgcggccagccgcttacccgtggtcgcggcaaaatgctgcctgttcacgcgcccacctcgggtaccgttacggctattgcgccccactctacggctcatccttcagctttagctgaattaagcgtgattattgatgccgatggtgaagactgctggatcccgcgcgacggctgggccgattatcgcactcgcagtcgcgaagagttaatcgagcgcatacatcagtttggtgttgccgggctgggcggtgcaggattcccgacaggcgttaaattgcagggtggcggagataagattgaaacgttgattatcaacgcggctgagtgcgagccgtacattaccgccgatgaccgtttgatgcaggattgcgcggctcaggtcgtagagggtattcgcattcttgcgcatattctgcagccacgcgaaattcttatcggcattgaagataacaaaccgcaggcgatttccatgctgcgcgcggtgctggcggactctaacgatatttctctgcgggtgattccaaccaaatatccttctggcggtgctaaacaattaacctacattctgaccgggaagcaggttccacatggcgggcgttcatccgatatcggcgtattaatgcaaaacgtcggcactgcttatgcagtgaaacgtgccgttattgatggcgagccgattaccgagcgtgttgtaaccctgactggcgaagcaatcgctcgcccgggcaacgtctgggcacggctggggacgccagtgcgtcatttattgaatgatgccggattctgcccctctgccgatcaaatggtgattatgggtggcccgctaatgggctttaccttgccatggctggatgtcccggtcgtaaagattaccaactgtctgttggctccctctgccaatgaacttggcgaaccacaggaagaacaaagctgcatccggtgtagcgcctgtgctgacgcctgccctgcggatcttttgccgcaacagttgtactggttcagcaaaggtcagcaacacgataaagctaccacgcataacattgctgattgcattgaatgtggggcttgcgcgtgggtttgcccgagcaatattcccctggtgcaatatttccgtcaggaaaaagctgaaattgcggctattcgtcaggaagaaaagcgcgccgcagaagccaaagcgcgtttcgaagcgcgccaggctcgtctggagcgcgaaaaagcggctcgccttgaacgacataagagcgcagccgttcaacctgcagccaaagataaagatgcgattgctgccgctctggcgcgggtgaaagagaaacaggcccaggctacacagcctattgtgattaaagcgggcgaacgcccggataacagtgcaattattgcagcacgggaagcccgtaaagcgcaagccagagcgaaacaggcagaactgcagcaaactaacgacgcagcaaccgttgctgatccacgtaaaactgccgttgaagcagctatcgcccgcgccaaagcgcgcaagctggaacagcaacaggctaatgcggaaccagaacaacaggtcgatccgcgcaaagccgccgtcgaagccgctattgcccgtgccaaagcgcgcaagctggaacagcaacaggctaatgcggaaccagaagaacaggtcgatccgcgcaaagccgccgtcgaagccgctattgcccgtgccaaagcacgcaagctggaacagcaacaggctaatgccgagccagaacaacaggtcgatccgcgcaaagccgccgtcgaagccgctattgcccgagccaaagcgcgcaaacgggaacagcaaccggctaatgcggagccagaagaacaggttgatccgcgcaaagctgccgtcgaagcggctattgcacgcgccaaagcacgcaagctggaacagcaacaggctaatgcggtaccagaagaacaggttgatccgcgcaaagcggcagttgccgcggctattgcccgcgctcaggccaaaaaagccgcccagcagaaggttgtaaacgaggactaaatggtattcagaatagctagctccccttatacccataaccagcgccagacatcgcgcattatgctgttggtgttgctcgcagccgtgccaggaatcgcagcgcaactgtggttttttggttggggtactctcgttcagatcctgttggcatcggttagtgctctgttagccgaagctctcgtactcaaactacgcaagcagtcggtagccgcaacgttgaaagataactcagcattgctgacaggcttattgctggcggtaagtattccccccctcgcgccatggtggatggtcgtgctgggtacggtgtttgcggtgatcatcgctaaacagttgtatggcggtctgggacaaaacccgtttaatccggcaatgattggttatgtggtcttactgatctccttccccgtgcagatgaccagctggttaccgccacatgaaattgcggtcaacatccctggttttatcgacgccatccaggttatttttagcggtcataccgccagtggtggtgatatgaacacactacgcttaggtattgatggcattagtcaggcgacaccgctggatacatttaaaacctctgtccgtgccggtcattcggttgaacagattatgcaatatccgatctacagcggtattctggcgggcgctggttggcaatgggtaaatctcgcctggctggctggcggcgtatggttgctatggcagaaagcgattcgctggcatattcccctcagcttcttagtaacgctggcgttatgcgcaatgttgggctggttgttctcaccagaaacactggcagcaccgcaaattcatctgctgtctggagcgaccatgctcggcgcattctttattttgactgacccggttaccgcttctacgaccaatcgtggtcgtcttattttcggcgcgcttgcgggcttattagtctggttgatccgcagtttcggcggctatcctgacggcgtggcttttgccgtcctgctggcgaacatcacggttcctctgatcgattactacacgcgtccgcgcgtctacggccatcgcaaagggtaaaccatgctgaaaactatccgaaaacacggcattacgttggcgctatttgcagcgggttcaacagggttaactgcggccatcaaccagatgaccaaaacgacgattgctgaacaggccagtctgcaacaaaaggcgttatttgatcaggtgctgccagccgaacgctataacaatgcgctggcacagagttgctatctggtaactgcgccagagttaggtaaaggtgagcatcgggtttacatcgccaaacaggatgacaaaccggtagccgccgttctggaagcaaccgcgccagatggctattccggtgcgattcagctgctggtgggagccgattttaacggcacggtacttggcacgcgcgtgacagagcaccacgaaacgccagggcttggcgataaaatcgaactgcgcctttctgactggatcacccattttgcgggtaaaaaaatcagtggtgcagatgatgcgcactgggcggtgaagaaagatggtggtgatttcgaccagttcaccggcgcgacgattactccccgcgcggtggttaatgcggtaaaacgcgccggattgtacgctcagacgttaccggcacaactttctcaacttcctgcctgtggagaataaagcgtgagcgaaattaaagacgttattgttcaggggttgtggaaaaacaactctgcgctggtccagttgctcggcctttgtcctctgttggcggtcacgtccactgccactaacgctctgggtttaggacttgcgactacgctggtactgacgctgaccaacctgaccatttcgacgctgcgtcactggacgccagccgagatccgcattcccatttacgtgatgatcatcgcctcggtggtcagcgctgtacagatgctgatcaacgcctacgcctttggcctgtatcaatcattagggatttttattccgctgattgtcactaactgtatcgttgtgggccgcgctgaagccttcgccgccaaaaaaggtccggcgctttcggcactggacggcttttcaattggtatgggcgcaacctgcgccatgttcgtgctgggttcactacgcgaaattatcggcaatggcacattgtttgacggtgcagatgcgctgttaggtagctgggcaaaagtattacgcgtggagattttccacaccgactcccctttcctgctggcgatgctgccaccaggtgcatttattggcctgggactgatgctggcaggaaaatacctgattaatgaaagaatgaaaaagcgccgtgctgaagcagctgcagaacgtgcattgccaaacggtgaaacagggaatgtctgatgaataaagcaaaacgcctggagatcctcactcgcctgcgtgagaacaatcctcatcccaccaccgagcttaatttcagttcgccttttgaattgctgattgccgtactgctttccgctcaggcgaccgatgtcagtgttaataaggcgacggcgaaactctacccggtggcgaatacgcctgcagcgatgcttgaactgggcgttgaaggggtgaaaacctatatcaaaacgattgggctttataacagcaaagcagaaaatatcatcaaaacctgccgtatcttgctggagcagcataatggcgaggttccggaagatcgtgctgcgcttgaagccctgcccggcgtaggtcgtaaaacagccaacgtcgtattaaacactgcattcggctggccgactattgctgtcgacacgcacattttccgcgtttgtaatcgtactcaatttgcgccggggaaaaacgtcgaacaggtagaagaaaagctactgaaagtggttccagcagagtttaaagtcgactgccaccattggttgatcctgcacgggcgttatacctgcattgcccgcaagccccgctgtggctcttgtattattgaagatctttgtgaatacaaagagaaagttgacatctgaagaaaaggggtaacaccgattaccccattgataacctttctttatcctcttttaaaacatctttttaacgtcaatgatgccattgcttagcgttatcatcaggtaatccgtttgcggataaccaaaaatgcaggttaattgtttttttaatagcgaaattttctattcattcgtgatcaagatcacgatgctgtcgcaatgtaaaaacattgcaagaatcaggttaaaatcatttaaatttacacacgcaacaaatattgacctacaaaacattacactggctatttttcagaaactggactatctcactagtaaaaacgctaaatagcagaacatatcgccgttaagccatcacccccctctcagtgcagtgaaaaaatctgccgttacgttttttgaaaaatttaacgctggataacatttcccggaatggttgaattccccgcctcagttatatgtaacagattattacaaaggacttgtctgaaagtgcaagatagtgaacattacctgccgtttcccctcccactataacaattgcgcgtatgttttttatacataacgcgagaaagcacccccgttaatatgggatgtaaaaaaagaggtaaaagtgtccactgcaaaccaaaaaccaactgaaagcgtcagtttgaacgctttcaaacaaccgaaggcgttctatctcatcttctcgattgagttatgggaacgttttggttattacggcctacaaggaattatggctgtttacctggttaaacaactgggtatgtctgaagcggattcaatcacccttttctcttcctttagtgccctggtttatggtctggtcgctatcggcggctggttaggtgacaaggtactgggtactaaacgcgtaattatgctcggcgctattgtgctggcgattggttatgctctggttgcctggtctggtcacgacgccggtatcgtttatatgggtatggcggctattgcggtcggtaacggcctgtttaaagctaacccgtcttctctgctttctacatgctatgagaaaaacgacccgcgtctggacggtgcattcaccatgtactacatgtccgtcaacatcggctctttcttctctatgattgctacgccgtggctggccgcgaaatacggctggagtgttgcgtttgcgttgagcgttgtaggcctgctgatcactatcgttaacttcgccttctgccaacgctgggttaaacagtacggttcaaaaccagacttcgagcctatcaactaccgtaacctgctgctgaccattattggtgttgtggcactgatcgctatcgccacctggctgctgcacaatcaggaagttgcgcgtatggcgctgggcgttgttgccttcggtatcgtggttatcttcggtaaagaagccttcgcgatgaaaggtgctgcgcgtcgtaaaatgatcgttgccttcatcctgatgctcgaagccattatcttcttcgtgctgtacagccagatgccaacgtcactgaacttctttgcgattcgtaacgttgagcactccattctgggtctggccgtagaacctgagcagtatcaggcactgaacccgttctggatcatcatcggtagtccgattctggccgctatctataacaagatgggcgataccctgccgatgccaaccaagtttgcaatcggcatggtgatgtgttctggtgcgttcctgattctgccgctgggtgcgaaattcgcgtctgacgctggtatcgtgtctgtaagctggctggtcgcaagctatggcctgcagagcatcggggaactgatgatctctggtctgggtctggcaatggttgctcaactcgttccgcagcgtctgatgggcttcattatgggtagctggttcctgaccactgccggtgcaaacctgattggtggttatgttgcgggtatgatggctgtgccggataacgttaccgatccgctgatgtcactggaagtctatggtcgcgtattcttgcagattggtgtcgctactgccgttattgcagtactgatgctgctgaccgcgccgaaactgcaccgcatgacgcaggatgacgctgcagacaaagcggcgaaagcagccgtagcgtaaaattcagggaaactcttttacaagccgctaacttttcgttagcggctttttttttgttcagcaacgcactaccatactttaaaccacagacaaaaggagttaccgatgaaattgttctacaaaccgggtgcctgctctctcgcttcccatatcaccctgcgtgagagcggaaaggattttaccctcgtcagtgtggatttaatgaaaaaacgtctcgaaaacggagacgattactttgccgttaaccctaaggggcaggtgcctgcattgctgctggatgacggtactttgctgacggaaggcgtagcgattatgcagtatcttgccgacagcgtccccgaccgccagttgctggcaccggtaaacagtatttcccgctataaaaccatcgaatggctgaattacatcgccaccgagctgcataaaggtttcacacctctgtttcgccctgatacaccggaagagtacaaaccgacagttcgcgcgcagctggagaagaagctgcaatatgtgaacgaggcactgaaggatgagcactggatctgcgggcaaagatttacaattgctgatgcctatctgtttacggttctgcgctgggcatacgcggtgaaactgaatctggaagggttagagcacattgcagcatttatgcaacgtatggctgaacgtccggaagtacaagacgcgctgtcagcggaaggcttaaagtaatagccatcggcccacaggtcgttgtgggccgaaatgagatatttcagagctttgttgcgctgaagtaatgttctggtttggcaatacgatcctgagcagccaccacttgcagctcatattcctgcattgctttggtggtcaccatgatttcgtagactgcagcggtcacatgttccagcgcctcctgcagcgttgccccctgaagcagtttcaccagcagtaaaccgctcgtcacatcaccaacacctaccggctggcgcataccaaaatccaccagcggacggctgatatgccaggcttcatcggcggtgaccagcagcatttcaaaacggtcacggctgtagccagctcgcgccaggtgtttaaccaacacaatttgtggcccttgcgcaatgagttcgcgcgctgccagaaccgcttcttcgacgttatttaccgcatgctcacagagtatttccagctcaaccagatttggcgcaatgatatcgctggcaggcaaaccgtgccgcacatgaaactctgcgacacccggtgcaacgatacagcctttttccggatgacccattaccggatcgcaaaaatatttcgcctgcggattcgcggctttcacctgacggacgataccgaggatatgttcaccctgctccgccgatcccagatagccacttaatacggcatcacaggtgtgtaatttatcaatggcggcaatgccttgcacaatttcggttaaatggctgggcggcatcacgcagccagtccatttgccgtattgggtgtgattagaaaattgaacggtgttcagcggccagacgttcgcgcccaggcggcgcatcggaaactctgccgcactgttacccgcatgaccataaacaacgtgagactggatagcgagaatatttttcatcatgttccctgtataaaaaccagggggagtgatttctcactccccctttccacttaatgcattatttccagcaaatcagacagtaattctttttaccgcgacgcagtaaggtaaaacgaccaaacagacgatcttcttctttaaagaagtattcaggatcggactgtttttcaccgttaatggtgatggcattggaggcgatagttttacgtgcctgaccacgggaaggttgcagttcagaatcgaccagtgcctgcatcaggtctgcgcccttttccatctcaaccatcggtacgccgtcctgcgccagctgttcgaagtccgcttcactcagcgcactcaaagaaccgctgaacaggcattcggtaatacgttttgccgcctgtaaaccttcttcaccgtgaaccagacgagtcacctgctccgccagtacatactgggcgcgcggtgctttaccgctgtttttatcttcttcttccagggcgttgatctcttcaatgctcataaaggtgaagaacttcaggaagcggtaaacgtcggcatccgcagtgttgatccagaactggtagaatttgtacgggctggttttcttcggatccaaccagactgcgccgccttcagttttaccaaatttggtgccatctgctttagtgatcagcggaacggtcaggccaaacacctgattctgatgcagacgacgggtcaggtcgataccagaagtgatgttaccccactggtcagaaccaccaatttgcagcaccacaccgtactgtttgttcagacaggcgaagtcataaccctgcaacaggttgtaggaaaactcagtgaacgaaatcccctgatcttcacggttgagacgctgcttaaccgcttctttgttgatcatctggttaacggagaagtgtttgccaatatcgcgcaggaaggtcagcacattcatattgccgaaccagtcatagttgttcgccgcgatagcagagttttctccacagtcgaaatcgaggaacggggcaacctgcttacggattttgtccacccactcctgaacagtttcttcggtgttcagcttacgctcggcagctttgaagctcgggtcgccaatcagacccgtcgcgccgcctaccagcgcaaccggcttgtggcccgcctgctggaagcgtttcaggcataacaatggaacaagatgccccaaatgcaagctgtcagcggtaggatcgaagccgcaatagagcgcgatcgggccttgcgccagtcgctctgctaacgcttcctcgtccgtcacctgggctaccagcccccgctcttgcaattgtttaatcaagttactgcttgccatcaaaatctccatgtatataacgactgcacctttgccggtacacgacttttcgccagatgcgaaagagacatagaataaagtgccagaatcaggagtaccagcgattaaagcaagatttttgcatcttttcagggtgcaagacgatcaatcttccacgcatcattttcacgctggtacaaaaagcggtcatgcaggcgatgctcaccaccctgccagaactcaatctgttcaaggctgacgcgaaaaccgccccaaaagctcggcaatggcacttcgccctgttgaaacttctgcttcagctccaggaatttactttcaaggataccgcgggcagaaatgcgactggactgcttcgaaacccatgcaccaatctggctatcacgcgggcggctatgaaaatatttcatcacttcgagagtcgaaagtcgttctgctttaccgatcaccatcacctggcgctcaagggtatgccacgggaacagcaggctaacgcgcggattattttcgatttgatgtgctttacggctgccgaggttggtgtaaaacaccatgcctttttcgtcgtaatgtttgagtaaaacgatgcgctgataaggctgaccatgttcatccacggtagcgaccaccatcgcggtagggtccgccagtttggcttcacaagcctgagagagccaacgttcaaaaagggttaatggatcggcgggaagatcgcggcggcgtaacccgcctttggtgtattcacggcgcagatgcgcgatttgctgcaattcgtcgttatcagacatggttttctttacggattgtcagtgggtgacgctattgtgcgccgcccctggaaaaatctcaacgctgtggattttgtaactgacagttattcaagacgatgcggtcgcgtttatagacagtcgcttcatcgcctttcgaccagaaaacatagattccgtcagtgtaacgcgcgccagaggctgaaatgccctgtttgagatgcagtagttgattatcgtaaacaaaactgacctcctggcgcggattattcagtttgaccgtcaacggtttttcatcacactggtattccagcgtatcggtttgcatgcgctcaaccagctgattaaaggcgctacagccggagagaaggaccggcaaaatgataattaacagttttttcatagtcatatcccgaagactttcctggtctggagggcaatacgccctccctaacgttccaagtgtaacggcagacgcggtaagaaaaattcagttaactctgatatcacgggttagcggggaaaatagcccccagtaccgtctcctggcttgcgccagtgacggaaggcagatttcctggtaatcccgccagcgtccgccaggcaagccaggcgaaagccaatgcttccatgtcatcgccactaatgccaacggcatcggtggtggtgacttctgtgcctggcagtaatgccgccagacgcgccatgagtagcggattacgactacctccaccacataccatcaatcgttcgcagccaccgctcaacaaaacttgttcagaaatggtcacggcggtgagttctgccagtgtcgcctgcacatctcggggatcaacacccggaaaatggcgcaaatggcgctccagccaaccatagttaaagtattcgcgtccggtgcttttcggtgcaggttgcgagaaatacgggtcgctgagcatattttgcagcagtgggagaataactttacccgcccgtgcccactcggcatctttatcgtaaggtttaccggcctgacgccagatccaggcatccatcagcatgttaccaggaccggtatcgtagcccccaaccggctgcccaggaatgagcagtgacagattggcgatgccgccaatattgagcaccattcgtcgctcggttgggtgagccagcagcgcatgatggaacgcaggtaccagcggtgcgccttgtcctcccaaggcaatatcgcgacggcgaaaatcaccgacaaccgtaattccggtgcgtgccacaatttgattgttatcgccaatctgtaaagtgtgtggtgccacgcccgtcggttcatgccagacggtttgaccgtgacaaccgatcgcaactatatctcttgcctgcagattttgttccttaagcaaggcattgaccgcatcagcaaaaagtcgcccgagttgagtatcaagctgtccaaactgcgaaagtgtaagctgctggccctggcaaatatccagtacagcctgtttcagagataccgggatcggccaactcaaacttgccagctgtgcgacccggtgttcatcaattgtcgccaacacaacatcaacaccatcaaggctggtgcctgacataacgccaataaagcggcccgatttcatagttcatcctttttcaatctgacgtttgcgcaccactcaaacataaacttttcgtgaataccatgcggaatgaccgatttttaccgttggtagtaaaacattatcttcaaatcaataatcatcatgaatgttttgtttataattggttgatcctactttcattatgatttgctcatatttggtagaacatgtaaccatggattcacatatgccatatactttgaccatgagggatgcttgcgtggcgtttcatggtgaacaggagatttttcaatgattaaacgcgtattggttgtttcaatggtaggtctgtctcttgtcggttgtgttaataacgacaccctgtcaggggatgtttataccgcttctgaagcgaaacaagtacagaatgtcagctatggcaccatcgttaacgtacgtccggtacagattcagggcggtgatgattccaacgttatcggtgcaattggcggtgctgttcttggtggtttcctggggaatactgttggtggcggaaccgggcgttctctggctactgcagcaggcgctgttgcaggtggcgtagctggtcagggcgtacagagtgcaatgaacaaaacgcagggtgtcgagctggaaattcgtaaagacgatggtaataccatcatggtggtacagaaacaaggcaacactcgtttctctccgggccaacgtgtcgtactggccagcaatggcagtcaggtgaccgtttctccgcgctaaataagtttgcgtgtggtcaggttactgaccacacgcccccttcatttcaccctttggcctgtaactcaatgatattatgctcaagttttgcgatgagcgtaatcagttgctccagttcctctgcggagatgccatgtaatatttccgcgcgggttttgttaataacagcttccatttcgctgatcagcggctctgccttttccgtcagtttaatacgtttagcccgacgatcgctggcacaagtttgacgcgaaattaaccctttttcttccagttggtccagagtacggaccagtgatggctgctcgatgccaatcgcttttgccagttgaatttgcgactggtctggaggtaactgatggatattgtgtaacgtaacccaatgggtttgtgttaactccagcggtttcaggcgatggtctatcagagcacgccatatgcgcaccaaccgtgccagatcagaacctagtggcgattccaatttcatctccttataattagcttgctaagatattatgcggcttttagaatagtgtgcagcaattgtattgctaaaacaaatgtattgctgcatttggttaccgtcagacatatttttcagaaattgcgcgtaaatttttcgcacttaaagaatatttattaatctaacgcaatatattcggtcgtaaaggaatctactttgtgaagtttatgctcaatgcaacaggattgcccttacaagatctggtgttcggtgcgtccgtctactttcctccgtttttcaaagcattcgcgtttggattcgtcatctggcttgtcgtacaccgcctgcttcgtggctggatctacgccggtgacatctggcatcccttgttaatggatttatcgctgtttgcgatttgcgtttgccttgctctggcaatactgattgcgtggtaactatgtcaattaaaacaattaagtatttctcaacaatcattgtagcggtagttgcggttcttgccggatggtggctgtggaattattacatgcaatctccgtggacacgcgacgggaaaatacgcgcagaacaggtttctatcaccccacaggtgtcgggacgtattgttgagctgaatataaaagacaaccagctggttaacgcgggggatcttctgctcacgatcgataaaacgccctttcagatcgccgagctgaacgcacaggctcagctggcgaaagcgcaatctgacctcgcaaaagccaataacgaagcgaatcgtcgtcgtcatctctcacaaaattttatttctgccgaagaactcgataccgctaacctcaatgttaaagcgatgcaggccagtgttgatgccgcacaggcgacgctgaaacaggcacaatggcaactggcgcaaacggaaattcgcgccccggtgagtggatgggtgactaaccttactacccgcatcggcgattacgctgataccgggaaaccgctgtttgcccttgtcgacagccactcgttttacgtcattggttattttgaagaaaccaagttgcgccatatccgcgaaggtgcaccagcacaaattaccctctatagtgataacaaaacgttacagggtcacgtttccagtatcggtcgggcgatttatgatcagagcgttgaaagtgactcaagccttattccggatgttaaacctaacgtcccctgggttcgactcgcccaacgcgttcccgtccgctttgcgctggataaagtcccaggcgatgtcacgttggtgtcgggcaccacctgtagcattgccgtaggtcaataatgaacgcatcgtcatggtccttgcgcaatttgccctggttcagggccacgctggcgcaatggcgttatgcgttacgcaataccattgccatgtgtctggcgctgacggttgcctattatttaaatctggatgaaccctattgggcgatgacctcggctgcagtggttagctttcccaccgttggcggtgttatcagcaaaagcctcggacgcatcgctggcagtttgctcggagccattgcggcactgcttcttgccgggcatacgctcaatgagccgtggttttttctattgagcatgtcggcgtggcttggcttttgtacctgggcctgtgcgcacttcacgaataacgtcgcgtatgcatttcaactggcgggctacacggctgccatcatcgcctttccgatggttaatattactgaggccagccagctgtgggatatcgctcaggcgcgcgtttgcgaggtaatagtcggtattttgtgcggcggcatgatgatgatgatcctgccgagcagttccgatgctactgcccttttaaccgcattgaaaaacatgcacgcccgattactggaacatgccagtttactctggcagcctgaaacaaccgatgccattcgtgcagcacatgaaggggtgattgggcagatactgaccatgaatttgctgcgtatccaggctttctggagccactatcgttttcgccagcaaaacgcgcgccttaatgcgctgctccaccagcaattacgtatgaccagtgtcatctccagcctgcgacgtatgttgctcaactggccctcaccgccaggtgccacacgagaaattctcgaacagttgctgacggcgctcgccagttcgcaaacagatgtttacaccgtcgcacgtattatcgccccgctacgcccgaccaacgtcgccgactatcggcacgtcgccttctggcagcgactacgttatttttgccgcctttatctgcaaagtagtcaggaattacatcgtctgcaaagcggtgtagatgatcataccagactcccacggacatccggcctggctcgtcataccgataacgccgaagctatgtggagcgggctgcgtacattttgtacgttgatgatgattggcgcatggagtattgcttcgcaatgggatgccggtgccaatgcattaacgctggcagcaattagctgcgtactctactccgccgtcgcagcaccgtttaagtcgttgtcacttctgatgcgcacgctggtgttactttcgctattcagctttgtggtcaaatttggtctgatggtccagattagcgatctgtggcaatttttactgtttctctttccactgctggcgacaatgcagcttcttaaattgcagatgccaaaatttgccgcattgtgggggcaactgattgtttttatgggttcttttatcgctgtcactaatcccccggtgtatgattttgctgattttcttaacgataatctggcaaaaatcgttggcgtcgcgttggcgtggttagcgttcgccattctgcgtccaggatcggatgctcgtaaaagccgccgccatattcgcgcgctgcgccgggattttgtcgatcagctaagccgccatccaacactgagtgaaagcgaatttgaatcgctcacttatcatcacgtcagtcagttgagtaacagccaggatgcgctggctcgccgttggttattacgctggggtgtagtgctgctgaactgttctcatgttgtctggcaattgcgcgactgggaatcgcgttccgatccgttatcgcgagtacgggataactgtatttcactgttgcggggagtgatgagtgagcgtggcgttcagcaaaaatcactggcggccacacttgaagaattacagcggatttgcgacagccttgcccgtcatcatcaacctgccgcccgtgagctggcggcaattgtctggcggctgtactgctcgctttcgcaacttgagcaagcaccaccgcaaggtacgctggcctcttaattacttaattacaccacaggcatagcgttcaccgccaccgcccagcggtttaggttgatcggacatattatcgccgccaacgtggaccatcagcgctttgtctttgatttcatccagtgatttcagacgaggcgcgatgacggcatcggtagctttgccgtcattattgacgaccagtgcaggcagatcgcctaaatgcccggcaccttctggcccttcatgtttaccggtattttgtggatcaagatgcccgcctgcggattccgcggcgctggctttgccatctttggtggctggctggcagcttcctttggcatgaatatggaagccatgttcaccggggggtaatgctttcagatcgggcgaaaactccagacctttatcggtttcagtaatggtgacgctaccaattgactgccctaccccttgcgacgtgacgaggttcatctcgactttttcactggcagcttgtgcgccggttgcaacaaccagcgccagaatagccagactaaaacgtttcataggacctccgttcattgtgcattcctgaataagtgtaaaccagtgacacatttttgaacggcggctattcctaaaagtgcttacggtacgtcgtaccccagtgccgctttacggatacgaaaccattgttgacgggtcattttcagtgtttctgcttcgacagctgcccgtacgcgctcaattttacctgaaccgataattggcagcggctgcgatggtaaacgtaatacccaggcgtaaaccacctgttcaatcgagcccgcgtttaactcctctgccaccacagccagttcatcacgcagcggctggaaataatcatcattaaacagacgaccaccaccaaggcaggaccacgccatcggacgaacacgcagttgttgtagttggtcgagcgtgccatccagcagtaacggctgatgcaccggggatatttccacctgattagtggcaagggtaaacggcagacgtgattgcaacagggcaaattgcgcaggcgtaaagttcgatacgccaaaatgacgcactttgccgctctgatgcagatgtttgaacgcatccgccacttcatcggcatccattaacgggtctggtcggtggattaacagcaaatccagatgatcggtcgcgagattaattagcgactgttcggcgctcttaatgatgtgatcgcggtcagtgatgtaatgaccaatgacgttttcttcacgcgcggtcgtcgcgataccgcatttactgacgatttccatccgttcacgcaggtgaggtgccagtttcagtgcctcgccaaacgccgcttcgcactgatagccaccataaatatcagcatggtccacggtggtcacgccgagatccagatgctcttcaataaaactgaccagctggcgggcggacatattccagtccatcaatcgccagtagcccatcacaaaacgggaaaactccgggccttgcggcgcaatagtaatacgctgaaccataatcgcttcctcttatcagatatgagaggagtatacgcaagattaggttcaaaagagtgatggttgctccggttcgtctgatgacgctggcttatttgcgcgtaatttgcgcattaatcgctgccgacaaaggcgcagcacctcttgtttttcgccatcgctcattttattccagttaaaacgctcatcacgactacgaaaacagccgcgacaaaacccgcgttcgtcagactggcaaattccccggcacgggctctggacgggaaagaactctaattgctccgccacttcgccctcctcagataagattattaccattattgaagctgttaatgtccaaagtagcaactttgcttgcactagaccgactggtctactacactccaacgcatgaacaaacacaccgaacatgatactcgcgaacatctcctggcgacgggcgagcaactttgcctgcaacgtggattcaccgggatggggctaagcgaattactaaaaaccgctgaagtgccgaaagggtccttctatcactactttcgctctaaagaagcgtttggcgttgccatgcttgagcgtcattacgccgcatatcaccagcgactgactgagttgctgcaatccggcgaaggtaactaccgcgaccgcatactggcttattaccagcaaacactgaaccagttttgccaacatggaaccatcagtggttgcctgacagtaaaactctctgccgaagtgtgcgatctgtcagaagatatgcgcagcgcgatggataaaggtgctcgcggcgtgatcgccctgctctctcaggcgctggaaaatggccgtgagaaccattgtttaaccttttgtggcgaaccgctgcaacaggcacaagtgctttacgcactgtggcttggcgcgaatctgcaggccaaaatttcgcgcagtttcgagccactggaaaacgcgctggcccatgtaaaaaacattattgcgacgcctgccgtttagcaggcattttttatcaccagacgaccgggagcctttatgtcatctgaaaaactgtattccccactgaaagtgggcgcgatcacggcggcaaaccgtatttttatggcaccgctgacgcgtctgcgcagtattgaaccgggtgacattcctaccccgttgatggcggaatactatcgccaacgtgccagtgccggtttgattattagtgaagccacgcaaatttctgcccaggcaaaaggatatgcaggtgcgcctggcatccatagtccggagcaaattgccgcatggaaaaaaatcaccgctggcgttcatgctgaaaatggtcatatggccgtgcagctgtggcacaccggacgcatttctcacgccagcctgcaacctggcggtcaggcaccggtagcgccttcagcacttagcgcgggaacacgtacttctctgcgcgatgaaaatggtcaggcgatccgtgttgaaacatccatgccgcgtgcgcttgaactggaagagattccaggtatcgtcaatgatttccgtcaggccattgctaacgcgcgtgaagccggttttgatctggtagagctccactctgctcacggttatttgctgcatcagttcctttctccttcttcaaaccatcgtaccgatcagtacggcggcagcgtggaaaatcgcgcacgtttggtactggaagtggtcgatgccgggattgaagaatggggtgccgatcgcattggcattcgcgtttcaccaatcggtactttccagaacacagataacggcccgaatgaagaagccgatgcactgtatctgattgaacaactgggtaaacgcggcattgcttatctgcatatgtcagaaccagattgggcggggggtgaaccgtatactgatgcgttccgcgaaaaagtacgcgcccgtttccacggtccgattatcggcgcaggtgcatacacagtagaaaaagctgaaacgctgatcggcaaagggttaattgatgcggtggcatttggtcgtgactggattgcgaacccggatctggtcgcccgcttgcagcgcaaagctgagcttaacccacagcgtgccgaaagtttctacggtggcggcgcggaaggctataccgattacccgacgttgtaatccaacattgcgagcggcgtaaagccgccgctatactaaaacaacattttgaatctgttagccattttgaggataaaaagatgcgtcttcttcataccatgctgcgcgttggcgatttgcaacgctccatcgatttttataccaaagtgctgggcatgaaactgctgcgtaccagcgaaaacccggaatacaaatactcactggcgtttgttggctacggcccggaaaccgaagaagcggtgattgaactgacctacaactggggcgtggataaatacgaactcggcactgcttatggtcacatcgcgcttagcgtagataacgccgctgaagcgtgcgaaaaaatccgtcaaaacgggggtaacgtgacccgtgaagcgggtccggtaaaaggcggtactacggttatcgcgtttgtggaagatccggacggttacaaaattgagttaatcgaagagaaagacgccggtcgcggtctgggcaactaatctcctgccgggcgtgaactcatcgcgcccgcatctttactgcatcgacaagtaatatttgtcataatgcgcgctgcaatttatccgtattaagagaatcagatgtccgataacgctcaacttaccggtctgtgcgaccgttttcgtggtttttatcctgttgtgatcgatgttgaaacagccggatttaacgccaaaaccgatgcgctgcttgagattgccgccatcaccctgaaaatggatgaacaaggctggctgatgccggacaccacattacatttccacgtcgaaccatttgtcggcgcaaatttgcaaccagaagccctcgccttcaacggcattgacccgaacgatcccgatcgcggcgcggtcagcgaatacgaggcgctgcacgaaatttttaaagttgtacgtaaaggtattaaagcgagcggctgtaaccgcgccattatggtggcgcacaatgccaattttgatcacagctttatgatggccgccgcagaacgcgcctcactgaaacgtaacccgttccaccctttcgccacttttgacactgctgcactggccgggctggcactcggacaaaccgtattgtcaaaggcttgccagaccgctggcatggacttcgacagcacccaggcgcactccgcgctgtacgacaccgaacgcactgctgtgctgttttgtgaaatcgtcaaccgctggaaacgtctgggaggctggccgctatctgccgccgaagaggtgtaatcgagtcgatgcctgatgacatgcaatgattcaggcatctatagtgaggctattccacgcatcctgcatgatattcacggggaatagcgttaatggcagataatccagacccttcatcgctcctgccggacgtgttttcaccggcgacccgcgactggtttcttcgcgcctttaaacagccgaccgctgtccagccgcaaacctggcatgtggcggcgcgaagcgaacatgcgctggtgattgcaccgaccggctccgggaaaacgctggcagcatttctctacgccctcgatcggctcttccgcgaaggcggcgaagatacccgcgaggcgcataagcgtaaaacctcacgcatcctctatatttcaccgataaaagccctgggcaccgacgttcagcgcaacttgcagatcccgttgaagggtattgccgatgaacggcggcggcgcggcgaaacggaagtcaatcttcgcgtagggatccgtactggcgatacgcctgcacaggaacgcagcaaactcacccgtaatccgccggatattctgatcaccacacccgaatcactctatctgatgctgacctcccgcgcgcgcgaaacgctacgcggcgtcgaaacggtaattattgatgaagtccacgcggtagcgggcagtaaacgtggtgcgcatctggcgttaagtctggagcggctcgatgcgctgctccacacctcagcacagcgaattggcctttctgccactgtgcgctcagccagcgatgtggcagcatttcttggtggcgatcgcccggttacggtagtcaacccgcccgcaatgcgccatccgcagatacgaattgtcgtaccggtcgccaatatggatgatgtctcatcggtcgccagcggcaccggcgaagacagccatgccggccgggaaggctccatctggccatatattgaaacgggtatccttgatgaagtgttgcgccatcgctcgaccattgtctttactaattcgcgggggctggcggaaaaactgacggcacgattaaatgagctttacgccgcacgcttacagcgttccccgtctatcgccgttgatgcggcccatttcgagtcgacctccggcgcaacctctaaccgtgtacaaagtagcgacgtttttattgcccgctcacaccacggctccgtctctaaagaacaacgagcaatcaccgaacaggcgctgaaatcgggtgaattacgctgcgtggtcgcaacctccagtcttgaactggggattgatatgggcgcggtggatctggtgattcaggtggcaacgccgctttctgttgccagtgggttacaacgcattggtcgcgccggacatcaggttggcggtgtatctaaagggctgtttttcccccgtacccggcgtgatttagtcgattccgcagtcattgtagagtgtatgttcgcaggcaggctggaaaacctgacaccaccgcataatcctctcgacgtccttgcgcagcaaaccgttgccgccgcggcgatggatgcattacaggtagacgaatggtactcccgcgtacgccgtgccgcaccgtggaaagatctgccaagacgtgtttttgacgccacgctggatatgctttccgggcgctatccctctggcgatttttctgcttttcgccccaaactggtctggaacagggagaccgggatattgaccgcccgacctggcgctcaattgttggcggttaccagcggcggcaccattccggatcgtggcatgtatagcgtgttattacccgaaggtgaagaaaaggccggttcgcggcgggtgggtgaactggatgaggagatggtatatgagtcgcgggtgaacgacattatcactctcggcgctacctcatggcggatccagcaaatcacccgcgatcaggtgattgtgactcctgctccgggtcgttctgcccggctccccttctggcgtggtgaaggtaacggacgtccggctgaattaggcgagatgatcggcgattttcttcatttgctggcggatggcgcgttcttttccgggactattcccccgtggctggcagaagaaaatacgatcgccaatattcaggggttgattgaggagcagcgcaacgcgacgggcatcgttccggggagtcgccatctggtcctcgaacggtgccgtgatgaaattggtgactggcgtattattttgcactctccctatggaagacgggtgcatgaaccctgggcggtggcgattgccgggcgaatacatgcgctatggggcgctgacgcgtcggtggtcgccagtgatgacggcattgttgcacgtattcctgacaccgatggtaaattgcccgatgccgcgatttttttgtttgaaccagaaaagttgctgcaaattgtccgcgaggcggtaggcagctcggcacttttcgccgcccgttttcgcgaatgcgccgcgcgggcattattaatgccggggcgcactccgggccatcgcaccccgctttggcaacaacggctgcgcgccagtcagttgctggaaatcgctcagggatatccggattttccggtcattctcgaaaccctacgcgaatgtctgcaagatgtttatgatcttcccgcactggaacgtttgatgcgtcgcctgaacggtggcgaaattcaaatatccgatgtaacgaccactacgccctcgcctttcgccacaagtttattgttcggctatgtcgcggaatttatgtaccagagcgacgccccgctggcagagcgccgggcatccgtactgtcgctggacagcgagttactgcgcaatctactcggacaggtcgatccgggggaattactcgacccgcaggtcattcgccaggtggaagaagagttgcaacgactggctcctggcagaagagcgaaaggtgaagaaggattgttcgacctgctgcgcgaactggggccaatgaccgttgaagacctggcgcaacggcatacaggcagcagtgaagaggttgcgtcgtatctggaaaatcttcttgcagtaaaacgaatcttcccagcgatgattagcggacaggagcgtcttgcctgtatggatgatgccgccaggctgcgtgatgccctcggcgtacgactaccagagtcattgccagagatttatttacatagagtcagttacccgcttcgcgacctctttctgcgctatctccgggctcatgctctggtcacggctgaacaactggctcatgagtttagtctcggtattgccattgtcgaagagcagcttcagcaactgcgtgaacagggtctggtgatgaatctgcaacaagacatctgggtgagcgatgaagtatttcgtcgtctgcgtttgcgctcgctgcaagccgccagagaagcgacgcgtcccgttgcagccacgacctatgcgcgattgctgctggaacgtcagggcgtattacccgccaccgatggtagcccggcgctctttgcctcaacatcgccaggcgtttatgagggcgtagatggcgtgatgcgggtgatcgaacagcttgccggagtcggtttacccgcctcactctgggaaagccagatcctgcctgcccgcgtacgcgactattcgtcagaaatgctcgatgaattactggcaaccggtgcggttatctggtcggggcaaaaaaaactgggtgaagatgacggcctggtggcactgcatctacaggaatatgctgcagaatcgttcactcccgccgaagcggatcaggcgaatcgttcggcgctgcaacaagcgatagtcgctgttctggctgacggaggagcctggtttgcacaacaaatcagccaacggatacgcgacaaaatcggcgaatcggttgatctctctgccctgcaagaggcgttatgggcgctggtctggcaaggcgtcatcaccagcgacatttgggcaccgttacgcgccctcacccgcagcagttccaacgcacgcacctcaactcgccgcagtcaccgggctcgtcgtggacgtcctgtctatgcgcaacccgtctcgccgcgggtatcttacaacacaccaaatctggctggacgctggtcgttattgcaggtggagccactaaacgataccgaaaggatgctggcgctggcggaaaatatgctcgaccgctacggcatcatcagtcgtcaggcggtgatagccgaaaatatccctggcgggtttccatcgatgcaaacgctttgtcgaagtatggaagactccgggcgaattatgcgaggtcgttttgtagaaggtctgggtggcgcgcaattcgctgaacgtctgactattgaccgattgcgcgatctggcgacacaagccacgcaaacgcgccactatacaccagtggcgctctctgccaacgatccggctaatgtgtggggaaatcttctgccctggcctgcacatccggcaacgctggttccaacgcgtcgggcgggtgcgctggtggtcgtttctggcggcaaattgttactctatctggcgcaaggtggcaaaaaaatgctggtctggcaggaaaaagaggaattactcgccccagaggttttccacgcgctgactaccgcactgcgtcgcgaaccacggctgcgctttacgctaacagaagtgaatgatctaccggtccggcaaacgccgatgtttacgctgctgcgtgaggcgggattttcaagttcgccacaagggctggattggggatagagaaaggactgacggatgcccgttcgcatccgtcagtattgcaggacggattattccgcgtccggctcttcagacttgtatttagcggcagtttctttgatcagctgctgcagttcgccacgctgatacatttcgatcacgatatcacaaccgccgaccagctcgccgtcaacccacagttgcgggaaggtcggccagttagcatatttcggcagttccgcacgaatgtccggattctgcagaatatcaacataggcaaaacgttcgccacatgcggcaagcgcctggactgcctgggcagagaaaccgcagctcggcagtttcggtgaacctttcatgtacagcaggatcgggttttcagcaatctggcgttggattttttcgatagtggtgctcattgtcttgcttcctcaaacttctttacggcagtaatctgacattgtagcgggtcagtgcggcatcggaaaataacattttcatcacgcttttgctattttatccctttgctctatttgttgcatttcaaatattcgtttcttctctgatgccggcaaactggcgtatttataaccatttttagctttcactgctgcatttttttgcgctcgccaacgaaacgtattttttaacaataaaagctattaactttctcttcttctatgcattagaatcatcaagttttgtaaatcagacgcaggcatgatagacctgccttaacagagggacgctcagtggcgcggataaaccgtatttcgatcacgctctgtgctttactttttaccaccctgcctttaacgcctatggcccatgcttcaaagcaagccagggagagttctgctaccactcatatcaccaaaaaagcagataaaaagaaaagcacggcaaccaccaaaaagacccagaaaacagcgaaaaaagccgccagtaaaagtacgaccaaaagcaaaaccgcttcttccgttaaaaaatcttccattaccgcttctaaaaacgccaaaactcgcagcaaacacgccgtcaataaaacggcctcagccagctttaccgaaaagtgtaccaaacgtaagggctataaatcgcattgtgtgaaagtcaaaaatgccgcgtcaggaactcttgccgacgcgcacaaagcgaaggtgcaaaaagctacgaaagtggcaatgaataaactgatgcagcaaattggtaagccatatcgttggggtggcagctcaccgcgtaccggttttgattgcagcggcctggtttattacgcttataaagatttggtgaaaattcgtattccgcgtacggcgaatgaaatgtatcacctgcgtgatgcagcgccaatcgaacgtagtgaactgaaaaacggcgacctggtctttttccgtactcagggacgcggcacagccgatcatgtcggcgtgtatgtcggcaacggcaaatttattcagtcaccgcgcacaggtcaggaaattcaaatcacttctctcagtgaagactactggcagcgccactatgttggcgctcgtcgggtaatgaccccaaaaacacttcgctaaaactttaccctgttgttacggcaacagggtaagttcatcttttgtctcaccttttaatttgctaccctatccatacgcacaataaggctattgtacgtatgcaaattaataataaaggagagtagcaatgtcattcgaattacctgcactaccatatgctaaagatgctctggcaccgcacatttctgcggaaaccatcgagtatcactacggcaagcaccatcagacttatgtcactaacctgaacaacctgattaaaggtaccgcgtttgaaggtaaatcactggaagagattattcgcagctctgaaggtggcgtattcaacaacgcagctcaggtctggaaccatactttctactggaactgcctggcaccgaacgccggtggcgaaccgactggaaaagtcgctgaagctatcgccgcatcttttggcagctttgccgatttcaaagcgcagtttactgatgcagcgatcaaaaactttggttctggctggacctggctggtgaaaaacagcgatggcaaactggctatcgtttcaacctctaacgcgggtactccgctgaccaccgatgcgactccgctgctgaccgttgatgtctgggaacacgcttattacatcgactatcgcaatgcacgtcctggctatctggagcacttctgggcgctggtgaactgggaattcgtagcgaaaaatctcgctgcataataactgatggcaaatgcagcattgcctgaagcgctacgcttatcaggcctacgcggatcatcgatgtaggtcggataaggcactcgcctcatccgacaagcgctgcatgatacgacgcctaacgcgtcttttcatgtcaacgcggatgagtcgttaacaccgcatccggcaagataaatcgcacgttgtcagcaactgtaacgcagaaggttatccttctgcgtttttgtttaattagctgttagcaacgcaaactgtttcaggttgttttctggctgacataaacaccagcaataatgccagtcccgcgacaatcgctcccatcaccggcacaaagctgtatcccagcccagcggaaattaccgcaccaccagcagctgctcccagcgcatttccaagattaaaggcaccaatattgactgatgaagacagacctggcgcttcactggcgacacgcatcacgcgcatctgtaacggcggtacgaccgcaaaggttgctgcgccccacaccaccatgctaatagctgcgccgaactcattgcgggccaggaacgggattgccagcataatcaccatcaacaacaacaaaaagcctttcaacgtgccgttaactgaacgatctgccagtttgccgccgagatagttaccgatagagaatccgacaccaatcagcaccagcattgccgtgacgaacaccggtgttgcgtgggtaatactttgcagtaccggagagatataggtgtagagagtaaacattgcaccagctcccagtaccgtcgtcagcaatgcagacagcacctgcggacgcattaataccgccagctcttttttcacttcaggtcgtgcccctgcaccacctttaggtaatgagaagaacagacttaccattgaaatcactcccagccccgccgttgccagaaatgacatccgccagccgatggtttcacccaaccaggtcgccgccggcacgccaccgatatttgccagggttaaccccataaacatagtggcaactgcgctggcctgtttatgttttggcaccacgcttgcggccacgactgaacccaaaccaaaaaatgctccgtgattcaggctggtcaaaatgcgtgaaagcatcagggtcatataatccggcgcgatggcggaaagtacgttgccgagcgtgaaaattgccatcaggaaaatcaacgcactgcggcgggcacgatgagaaagtagaagcgtcatcagcggcgcgccaaccattacgccaactgcataggcactgattaacattccggcagcgggaatcgagacatccacaccgcgcgcaatgacgggcaacaagcccattggcgagaactccgttgtcccgataccaaacgcgccaatcgccagcgccagcaacggatagttaattttcatgccttatctccacctcttcgcgtcattacgcgatattcattaaagtggcgaaagcatgacagcaatcacaaaaaaatgaaaataacaaaaagagaaaacacttttgccattttgctaacaaacaggaaggagatgcgagggagaacgcgctccctcgagaggaaatcagtgcagcgcggcagtcaaacccacggctacgatcaaaccgaggacgataatcgttgttaccagtgaaaatttaaggtcggtgctcatcaagttttctccttttttattaccacacaaaaagtgatattacgcatttttacacactgtgatgaaaaaatctcccgtcatttataatgataagtgtttttaccacttccccttttcgtcaagatcggccaaaattccacgcttacactatttgcgtactggccattgaccccttcctgacgctccgtgtcgtttttccggcgtaccgcaacacttttgttgtgcgtaaggtgtgtaaaggcaaacgtttaccttgcgattttgcaggagctgaagttagggtctggagtgaaatggaatggcaacaataaaagatgtagcgaaacgagcaaacgtttccactacaactgtgtcacacgtgatcaacaaaacacgtttcgtcgctgaagaaacgcgcaacgccgtgtgggcagcgattaaagaattacactactcccctagcgcggtggcgcgtagcctgaaggttaaccacaccaagtctatcggtttgctggcgaccagcagcgaagcggcctattttgccgagatcattgaagcagttgaaaaaaattgcttccagaaaggttacaccctgattctgggcaatgcgtggaacaatcttgagaaacagcgggcttatctgtcgatgatggcgcaaaaacgcgtcgatggtctgctggtgatgtgttctgagtacccagagccgttgctggcgatgctggaagagtatcgccatatcccaatggtggtcatggactggggtgaagcaaaagctgacttcaccgatgcggtcattgataacgcgttcgaaggcggctacatggccgggcgttatctgattgaacgcggtcaccgcgaaatcggcgtcatccccggcccgctggaacgtaacaccggcgcaggccgccttgccggttttatgaaggcgatagaagaagcgatgatcaaggtgccggaaagctggattgtgcagggtgactttgaacctgaatccggttatcgcgccatgcagcaaatcctgtcgcagccgcatcgccctactgccgtcttctgtggtggcgatatcatggcaatgggcgcactttgtgctgctgatgaaatgggcctgcgcgtcccgcaggatgtttcgctgatcggttatgataacgtgcgcaacgcgcgctattttacgccggcgctgaccacgatccatcagccaaaagattcgctgggtgaaacagcgttcaacatgctgttggatcgtatcgtcaacaaacgtgaagaaccgcagtctattgaagtgcatccgcgcttgattgaacgccgctccgtggctgacggcccgttccgcgactatcgtcgttaatcacccgttgcgggagtctcttccggctcccgcagccactccttattcagcgtctcactatcgccgagatactcaagcaaccaggttaacgcaggcgacatatcattttgctgccatgtcagacaacatgccgaatccggaaaggggttttccagttctaatgctacccacttcccctcattaagccacggtttggcgaaatgtgttggcaccatccctatgcataatcctgccgagatacaggttgccgatgattcccagtcaggcacgacaactcttttttggttatccagcaaccaggtaatacgtttaggtagcgttcgcgaggtgtcttcgcgcaccaacgacggccagttgcgcaacgtatcatcgctgaacgggccatccatcaacgccagcgggtggtgactggcaacaacgcaactccagcttagcatccccatatcccggaaggcataacgaccgcctaccggaatcgcgcgtgttgcgccaatcgccagttccacgcgcccgtcggaaagcgcatcccagacaccgttgaacacttcctgaaagacaagaagttcgacatcatcaaaatggcgataaaaatcaacgatcatctgccgtgtacgttctggcctgacaatattatccactgcgatagctaactgaccgcgccagccgttcgctatctgctgacattgctggcgggtgatctgcatttttttgacaacagagcgcccttctttgagaaaccacgctccagcagcggtcagctccacatcacggtgccgtcgttcaaagagcggcaccgccagccactcttccagctgacgcacggtatagctgaccgcagaaggaacgcgatgcagctcctgtgccgcagcgctaaaactaccattacgcgctaccgcatcaacaacttcgagtgaatattctgaccacatagtctgcctgcaaaatttttgaaaccagtcatcaaatattaccgtttcacaacactaatttcactccctacactttgcggcggtgtttaattgagagatttagagaatatacatgcaacctgggaaaagatttttagtctggctggcgggtttgagcgtactcggttttctggcaaccgatatgtatctgcctgctttcgccgccatacaggccgacctgcaaacgcctgcgtctgctgtcagtgccagccttagtctgttccttgccggttttgccgcagcccagcttctgtgggggccgctctccgaccgttatggtcgtaaaccggtattattaatcggcctgacaatttttgcgttaggtagtctggggatgctgtgggtagaaaacgccgctacgctgctggtattgcgttttgtacaggctgtgggtgtctgcgccgcggcggttatctggcaagcattagtgacagattattatccttcacagaaagttaaccgtatttttgcgaccatcatgccgctggtgggtctatctccggcactggctcctctgttaggaagctggctgctggtccatttttcctggcaggcgattttcgccaccctgtttgccattaccgtggtgctgattctgcctattttctggctcaaacccacgacgaaggcccgtaacaatagtcaggatggtctgacctttaccgacctgctacgttctaaaacctatcgcggcaacgtgctgatatacgcagcctgttcagccagtttttttgcatggctgaccggttcaccgttcatccttagtgaaatgggctacagcccggcagttattggtttaagttatgtcccgcaaactatcgcgtttctgattggtggttatggctgtcgcgccgcgctgcagaaatggcaaggcaagcagttattaccgtggttgctggtgctgtttgctgtcagcgtcattgcgacctgggctgcgggcttcattagccatgtgtcgctggtcgaaatcctgatcccattctgtgtgatggcgattgccaatggcgcgatctaccctattgttgtcgcccaggcgctgcgtcccttcccacacgcaactggtcgcgccgcagcgttgcagaacactcttcaactgggtctgtgcttcctcgcaagtctggtagtttcctggctgatcagtatcagcacgccattgctcaccaccaccagcgtgatgttatcaacagtagtgctggtcgcgctgggttacatgatgcaacgttgtgaagaagttggctgccagaatcatggcaatgccgaagtcgctcatagcgaatcacactgatctatatcgatatacttatacttaggctgctaacaaaattttgttgtatgattgaaattagcggcctatactaatttcgagttgttaaagctacgataaatattatgtttttacggggacaggatcgttcccgactcactatggatagtcatttcggcaagggttcctcctttccctctgttctacgtcggattatagactcgcggttttttctgcgagatttctcacaaagcccaaaaagcgtctacgctgttttaaggttctgatcaccgaccagtgatggagaaactatgagttcatcgtgtatagaagaagtcagtgtaccggatgacaactggtaccgtatcgccaacgaattacttagccgtgccggtatagccattaacggttctgccccggcggatattcgtgtgaaaaaccccgatttttttaaacgcgttctgcaagaaggctctttggggttaggcgaaagttatatggatggctggtgggaatgtgaccgactggatatgttttttagcaaagtcttacgcgcaggtctcgagaaccaactcccccatcatttcaaagacacgctgcgtattgccggcgctcgtctcttcaatctgcagagtaaaaaacgtgcctggatagtcggcaaagagcattacgatttgggtaatgacttgttcagccgcatgcttgatcccttcatgcaatattcctgcgcttactggaaagatgccgataatctggaatctgcccagcaggcgaagctcaaaatgatttgtgaaaaattgcagttaaaaccagggatgcgcgtactggatattggctgcggctggggcggactggcacactacatggcatctaattatgacgtaagcgtggtgggcgtcaccatttctgccgaacagcaaaaaatggctcaggaacgctgtgaaggcctggatgtcaccattttgctgcaagattatcgtgacctgaacgaccagtttgatcgtattgtttctgtggggatgttcgagcacgtcggaccgaaaaattacgatacctattttgcggtggtggatcgtaatttgaaaccggaaggcatattcctgctccatactatcggttcgaaaaaaaccgatctgaatgttgatccctggattaataaatatatttttccgaacggttgcctgccctctgtacgccagattgctcagtccagcgaaccccactttgtgatggaagactggcataacttcggtgctgattacgatactacgttgatggcgtggtatgaacgattcctcgccgcatggccagaaattgcggataactatagtgaacgctttaaacgaatgtttacctattatctgaatgcctgtgcaggtgctttccgcgcccgtgatattcagctctggcaggtcgtgttctcacgcggtgttgaaaacggccttcgagtggctcgctaaaggctattctatcgccccctctccgggggcgatttcagatcaggcttctgtgcctggttgattcatggcattttctcgtgccgccagcacacgttctaccgtatctaccactgcctgagtttgtggatcgatttcaatgttgacgcgtgcgccaagttttttcttcccaagagtcgtgcgttccagtgtttccggaattaaatggacgcaaaaacgcgttggcgtgacttcgccgacggtcaggctaataccgtcgatgccaataaatcctttgtacagaatatatttcatcaactgactatcctggactttaaaccagatctggcgattattttctgaggttaatattttcgccacttcagcagtggtcataatatgacctgacattaagtgtccgccaatttcatcactgaatttcgccgcacgctcaacgtttacccaatcccccacttttaaatcgccaagattggtaatgcgtaacgtttctttcatcaggtcaaaactgacatggttgccgttaatttccgtcacggtcaggcagcaaccgttatgcgccacggaagcaccggtttccaggccgtccagcatgtggtcgggtaactccaccacatgcgtacgaaaatttggtttctcgtcaatcgacaccagttttgcggtgccctgtacaatccccgtaaacatacttacaactcctgaaatcagttaagacattctgttcagcacaatagcaggtggaaaacgcccttaccagtgaaggggtaagaatggctattttttcactggagaattaataaatcctcgctacaatagactgaatttcccctgcttcttctttttgctgcccattcaggcggctttttagtctctcatataactacaaataaaaggtgttcacgtgcagaagtatatcagtgaagcgcgtctgttattagcattagcaatcccggtgattctcgcgcaaatcgcccaaactgcgatgggttttgtcgataccgtgatggcgggcggctatagtgccaccgacatggcggcggtcgctatcggtacttctatctggcttccggcgatcctctttggtcacggactgctgctggcattaacgccggttatcgcgcaattaaatggttccggtcgacgtgagcgcattgcgcatcaggtgcgacaaggtttctggctggcaggttttgtttccgttctcattatgctggtgctgtggaatgcaggttacattatccgctccatggaaaacatcgatccggctctggcggacaaagccgtgggttatctgcgtgcgttgttgtggggcgcgccgggatatctgttcttccaggttgcccgtaaccagtgtgaaggtctggcaaaaaccaagccgggtatggtaatgggctttatcggcctgctggtgaacatcccggtgaactatatctttatttatggtcatttcggtatgcctgagctcggtggcgttggttgtggcgtggctactgcggcggtgtattgggtcatgttccttgccatggtttcttacattaaacgcgcccgctccatgcgcgatattcgtaacgaaaaaggcaccgcaaaacccgatcctgcggttatgaaacgactgattcaactcggtttgccgattgcgctggcactgttctttgaagtgacactgtttgccgtcgtggctctgttagtgtctccgctcggtattgttgatgtcgcaggacaccagattgccctgaactttagttcactaatgttcgtgcttccaatgtcgctggcggcagcggtaactatccgcgtaggttatcgtctgggtcagggctcaacgctggatgcgcaaaccgctgcgcggaccgggcttatggtgggtgtctgtatggcaaccctgacggccattttcacggtttcactgcgggagcaaatcgccctgttgtacaacgacaatcccgaggttgtaacgctggctgcgcatttgatgttgctggcggcggtatatcagatttctgactcaatccaggtgattggcagtgggattttgcgtggttataaagatacgcgttccattttctatattacctttacggcttactgggtgctgggcttgccaagcggctatattctggcactgaccgatctggtcgttgaacctatggggccagcaggcttctggataggctttattattggcctgacgtcggcagccattatgatgatgttgcgtatgcggttcctgcaacgtctgccgtcagccatcattctgcaacgagcatcccgctaataaagacaaggcgcaaccttcacgggttgcgcctgtatttttacgcaggctggagcgttgcgccaatcccgtcttcgtctggctgtaatttcagagcgttacacagagtttgccgactggcatctgttatctcaacgtgtatatccccggtaacttcccctttcacattgatgaagtcaggtgaaatttcttttgcactggtttgcaggcaaatcgctccctctccgcgcaggcgtttcactttcagttgcacatgcgttgccgcatcagtgatcagccacagttttccaccattcagattgatgttaccaacaatgaaagtgacactgtcaccttttaccgtactgccgtctagaatcaacacaccgccctgctgtacagtaatcgttgattgttgcagctctgcgccataaccaataatcattgaagcgccgtccagtaatgcaacactcccggtcagttcaaccggtgcgcgatcttcctctacgacaaaattttcgtccgcgctggtgggtgacaacaggatcactgtcccaccttgtattaccgcgttttccagcgtaccggcatgcacttcagcccgaccacccacattcacggacaggttttgcgtcttaccggaactgtagagctgaaggccatccgtccccagacgataaatggatccattctcaacaatagtgtcagagtcttcaccaccgagattattcatggtgccaccagcaagcaacgtatcactggctttcccggccagcataaaaacgccgccctgattaatctcacaattgctggcttccccacctggatacaccaacaattcaccaccttcatctaccacgaccgctgaggttgtcccattaaccaacaggccgccctcttgatcgagaatgattttttccgcgcgatgtccttccagtacacgcaggttaccgccattttccagcaacaaaccgcaggcataacctttatcaacgctgaattcaccttcgggatggcggccattaaccgtagcgagcgtagagagactaattgcgcctccctcggactgaacaatatctgtggcaatggcaccatcgctgaccgatagcgtgccattgttaccgtactgtgtgcatttggcgatcccaccggttgccactttcaaccagccagcccccgtgaccacggtattttcggctcttccgccagcttcaacaatcaactcgccttcagtaagttgcgtcgcgccaatgacctcgccggtcttaacaatttgcacgttcccgtcgctcatcaagtttttcgcatcagatcccatgatttattcctttgctgcatctgtgtgcctttattgctacctaagtgtaaaggctacggaggatttatccacgacagatttgagatggtggcaaacaactctgtttaaactctgatacacgaattattgggttgtatcagatgtaaatgcgatcctgaataaaaatcacccttgcaaatcaacaaaatatagccaatttgcttaaaagctctgcaaacggtcgaaatagcgcagaaaattacgttttgcctcttgccaccttcccactctgccgctaatattcgtccccgttgtcacctacaacgttgcgttcatagctcagttggttagagcaccaccttgacatggtgggggtcgttggttcgagtccaattgaacgcaccatcctgcgtccgtagctcagttggttagagcaccaccttgacatggtgggggtcggtggttcgagtccactcggacgcaccagattttcttaatctggtcttctcctttttccctctgtttcttctctgtatccaatacgttaaaagatttacactgtcttcgtatgcgttatcagaaggagaatcgctatggcaactttgttacaacttcattttgcttttaatggcccatttggcgacgcaatggctgagcagcttaaaccacttgctgagtcgattaatcaggaacctggttttctgtggaaggtatggacagaaagtgaaaagaaccacgaagccggtgggatctaccttttcactgatgaaaaaagcgcccttgcctatctggaaaaacatactgcccgactgaaaaatctcggcgttgaggaagttgtcgccaaagttttcgatgtcaatgagccacttagtcaaatcaatcaggcaaaactcgcctgacagaatttaatcaagggcggttagcgcccttttcatccctgtctgaaatttctcaaattctaaaaatctcaaccaaacttatctgataacactaaattcgaaagaatgcgtacaggtaagtaacaatgaaaaaaattgctattgtgggtgccgggcctacggggatctacaccttattctcgcttctacagcaacaaactccactttctatttctatcttcgagcaggctgacgaggccggtgtcgggatgccatacagtgatgaggaaaactcaaaaatgatgctggcaaatattgccagtattgaaataccgccgatttattgtacgtatctcgaatggctacaaaagcaagaagacagccatctccagcgttatggcgttaaaaaagaaaccttgcacgatcgtcagtttttaccgcgaattctgctgggcgaatatttccgcgatcaatttttacgactagtagaccaggcacgacagcaaaaatttgcagtggctgtttatgaatcatgccaggttaccgatctgcaaattacaaatgctggcgtcatgctcgctacaaatcaggatttacccagcgagacgtttgatttagcggtgatcgccacgggtcacgtctggcctgatgaagaagaagcaacccgaacgtattttcccagcccgtggtcaggcctgatggaagcaaaggtcgatgcgtgtaacgtgggtattatgggaacatccttgagcggactggatgcggcaatggcagtggctattcagcatggttcgttcattgaagatgataaacaacacgtcgtttttcaccgcgataacgcaagtgaaaagctaaatatcacgttgttgtcgcgcacgggtattttacccgaagccgatttctattgccctattccctacgagcccttacacatcgtcaccgatcaggcattaaatgctgagattcaaaaaggcgaagagggccttttggatcgggtatttagattgatagtagaggaaatcaagtttgctgatccagactggagtcaacgcatagccttagagagcctgaatgtcgattcctttgctcaagcctggtttgccgagcgcaaacaacgcgacccatttgactgggcagaaaaaaatctccaggaagtcgaacgcaataaacgagaaaaacatactgttccctggcgttatgtcattctgcgcctgcatgaagccgtacaggaaattgttccacatctgaatgaacacgaccataaacggttcagtaaaggccttgcccgggttttcatcgataattatgcggcaatcccttcagagtctattcgtcgcctacttgccttacgtgaagcgggaatcattcatattctcgccctcggtgaagactacaaaatggaaattaatgagtcgcgcaccgtcctgaaaacggaagacaacagctactcgtttgacgtttttattgatgcccgcggacaacgtccgcttaaagtgaaagatatccctttccctgggctacgcgagcaattacagaaaacaggggatgaaatccctgatgttggcgaagattatacgttacagcaacccgaagatattcgtgggcgcgtagcgttcggcgcgttgccctggttgatgcacgaccagcctttcgttcagggacttacggcatgtgcagaaattggtgaggcgatggctcgggcggtcgtaaagcctgcatcccgtgctcgtcggcgtctttcgtttgattaaaggtaaagctatcagcactcaacaaactgatgctgttcattaagacgatagcggactccggctcgaatattgttttcaccttcaatggcgacggcgaagcgaactctttcgccgtcatgatatgccagtgcggcgcttcctcctggcccgagaataattgagtcgaccacgcccgtgctcactaccgttgaattttcaccgctggcaatgatgtgtacattgtcgccgctgttggcaattctggcgtttgcgccaaagctggcgatttgcaccaggtcaccattactggcgacatgacaccgttcacccaatgtacaaacgcgtactcgcattccggtattcgcaatccgactgctatctccagcgctgcttatccgcgaagaattaccggttacagcaacccgtgcgcgttcaccggagctgccaatgtgactgttaaagccgacacttccaatccgcacgctataacccatactggcaatttgcgcggcatacccagcggttgcgattctggcgttatcctcacaacagccgatgcgagcatgatcgtcgctgcgggcaaactgactgcaaaatggtctctctccggggtctgtggccagtttttgcatagaggaaacttcctgatgcgcgaagttttcatccgccagccattttttccacgcatactcaaccagactctccgcccagtccgtatatccttcctcaatcagtgcatgatgaatatcggcataactaccgccgcgtgggaaatggcgcaggaaccagcgatacatcaccgctccgatacgccattctcgcaggtctgcttgtgtaatgatcattcgttagtgccggtgatagccatcgaccatgcttttaaaggtttcgtgtggcgtacgccccgtggtgcaaagataaagatgaccgaagataaaaaagaggcttataaatgccagagcaaaatgtgtctgcaataaccagtatcttacgccaggaaacacatctcccacggcttgcggatagagacacagcagccccgtcaatagtaacaacggcagcaatccatacatgacaccaacataggcgacctgctgtaagggattaaatttagactgggttgttgccgggaaaggatgttcttccccctgcataatgccaaacaaataaaatcgcgtttgttttgccgctcgttccagccacccctgacgacgaatgcgatagtggtgaccattatccccaacggcattgatcagcacaaagccgagccagcatgccagtaacaaaaatccgcaaacttcatgcaccgcaaccagacttttaaccgcagttgcgcccaccatcgcaaagtgatttatcagcccactggccagcaacaatacaaagagtaacgcattcgaccagtgccataatctgaccgctttgctgtaaagataaatcttctcaccatgatcggtggctgatttcttcacgccacgagcacgaagcaaggcatgcagccccagcaccaaccacatcccaaccagcaatactccggcaatgatcaaccacaccggccaaaattcgggagtgaactgtggcacatagttcgctaactggctctgaaactgttcagcatgttgcgacgggttcatacattttcctttttaatcaaatgttgaccgaaccggcgatacagatgcggtttcccggcaccaggtagctgatattgatagtatttattttgctgcaaccacgcctgaatttctgggctatcttcgcgaccaaagatcaatgcgtgttccgggcaggcgctgacgcaaatgggcggaaagccttttgccagtcgggactcagcgcagaaatcacatttatctgccactttagtgacagggttaaggtagcgaacctggtacggacaagcgccaatgcaataactgcagccgatgcactgcgatttttctacccgcacgatcccctgctcatcacgccacgacgcccccgtcgggcaaacgtcgatgcacggagcatcttcgcagtgctgacatgactggcgaaaaaagtgatactgcgtttcgttgtcgttatcggtgactggaatgtgtgctatcgataaacggcttccctgagcggggacgtggttagttttacggcatgcgcgggcgcaaatattacagccattgcaccgtgactcgtcatgaatcatggcataccgaacttccttttcttgcctcgtgttcgctaacagagaagacgcagaaccagtaaaaaagattactgttcccatccccagaacaaatttgcgtcgagtgaaggacatctgattatcccctaatgcagtggctgcaactgtccaccctatccatgacatctccctgaaatttcaggggttctgaaactgctctacctcgaaccattcgcataagccataagccttgccataggtcataaatcgctcgctaaacaagtacaacaccgccgtcgatgactccacctgccgtatatcggcatattcaggtgcaacatccatcgcggcgatcgcggcttcaatctgcgcttcctggaagtaatatggcgcttgcatcagcatggcgactttgtaaggacgaggatacgtctggcactcaaaacgaacggcgtgtgcaatggcgcgacaaatgtcctgctccacaacttgcaaagacatcgccgcgtagttttcactcatggcctgcgttgagtaatagtaatcatccttgcttcccgtcaaacaagcgatatccgcgtagtctccgttctgcttaatgctttccagcaaaactgacagttcctcttctgcaaccaaatagggtggcgagagaaacacggcgcgcgccaccagctgcccagccgcagaatgctggcgaatgaactcagccaggatttcagcaggttctggttcggttaccgtatcaacggggtgacgcatcccctgcaaccattgccgcttcgcctcgtcaacttcgctgactttcgctaacggcaattcatcctgatggttcatcttacccattccttacgcaggcagtagattgtgtgctgccagatcggcggcaatatcttccagccccagacgctgcaatgtttcgcgggttggacaaccaagctgtgggtcccagcccatttctttgtagaacatcgtgagcgaagcatgcatatcgtcacgatccattttgtcagtaccttcagtaaagaccgggatctgcggatccttgtcgaatacccaggaacagataagatcgtgttcattacgcatatctttggtttgcatcagttttaccgtgtaggcacgatgcaacgtaaaaatacgctctgcagctaaatctaatttttcctgagtcatctcttcgccggtgatcgctttgaagaatttggcttcaagcgccagatcgccccggtaattacggcttttcagcggcgaaacggtcattggccagacccagttgcacagggtgacggcgttatgcaaacagacccgcaacagcgaccactttgcatatttaatttttgcgtcattgattggcgtgtagtttttggtttcatcgtaagcatcttcagaaccaaaaagttctttcgccacttcacgttgcagtttcaatggcaagccggaaccaataaagttgatatgggtatgcgtcatgcagtcacggttgaacatacagttaacaatggaaccgacctgcgctgacgcttcattggcatggtgaaccggatagccaaacggcgaccagagtttatttttcgcgtagccccagtactcttcacccaaattccagcgttctgcgatggcatatgaaccatcagccaggtgactcagctcacccacacgatgcgccagacggtagtaaaaatctttaatgaagttaacgtcacccgcttccagttgatcccagcgaatttctgcatactcttcagctggcagaacacgcttgaacacacctttgctgtaacaataagtaaagtcgcgatgcaactgcccgtagttacaccataggccgtagtcatcgaacaaattcagacccaccaggttaccaatcacacgaccatcgtctttatcttcaaaatctttcggcccgttcgggaagatggtggtatggacaaagtttgctacacaagtgttaccacctgtgctgggcacgccaaactctttcacccgaggaatattcatttgggtcatacaacggatcgggcaagagtggcagccgctcatttttactgtgtatttctctgccgccggtcctaagtcaaaaacggatttataggtacgaaagccgaccgtattctgattgcctggcggaatttcacccgtttcaatcggaccaccttcagccgcgccccaaaacagccctttacgtgctgtccagcgtgacttgggatctgaatactctgcccacgattgtggcgtacttggcacgacatggttgttattcgcaccaataagttcagtcatcatgtaatcattgagacgcttcatctcctgacgatcggcaatgttgacccctttcgtcccttcaaccgcaatcgctttcaggtttttcgaacccattattgcgccagttcccgcaccgccgctgtggttacggctattcaacatgccagagagaggaacaaggttttccccagcctgaccaatagccgccacacaggtttccggactggtcaatcgacaaatttcttccgtcgttgcgcgcgtcccttttccccataagaaatcggctttttccaggctaactttgtcatctttaatcttcagccataccggtgatttcgccttcccttcgataataatgacgtcgtatccagcgaatttcatttgcgctgcaaaaaagccacccatatgggcatcgacgactaaatttcctttggtaaaagtagaaagtgaggtgatatttacgcgagaactacagggggcaccagatccagttaatgggccggtagcaaagactaatttattcgcttcatcgaaaggtttcgtgcctggcggtacttcgtcatacataattttgtagccgaagcccatgccaccgacaaaacttttaaacttactggaatcttcgagggtaatatttcctgtcgtgagattgactcttaatatattacctgtccaaccgttagccatgattttttcctttgcaagattcacacagtaatatctttccactcgataatttttaacgcccctgttgggcaggcgtttgcgcattcaccgcataacacacatttcgaggattttttactttcggtatttacggtggccatcatccacgggcatgccgtagtacaggcgctacagccaatacagcgtttatgatcgacggtaatacagccttctttctgctgccaggtaatcgcaccaatcgggcagacgttcatgcattgcggctctttgcattgacggcaggtgtccgcggtatagttgagatcgccatacaggccgccgccagagccaaccccgttgtcgccaaagaaataattgcgatggattttgatacgggagaagaatgtccctactgagccatcgttgaagttggtacaagagatttcacagcggtggcaacccgtgcatcgcgctcgctgggtcaccagcacccctttgggggtatttatcaaccctactgtgccgctatcaatatcttcctgtttgcaacccaaaagtgacagtaacgcaggggcaattgttagaccagcaaggccttttcctgatatacgcaagaattctaatcgcgttaagccaatatctaatagtggacgatcaaccgggttcatttatttcgcatcctcttcgcaaacacagtgctgacaattcagcagcctgatattaagcattcaactaatacgctgctgactctgtccccaacaccagatattttccctaacccgatagtgtatgagaaaagattaacgccgataaactaatcctttatggttaggagaaaaaataatgtgattattctgagcccttaacattgatcgttatcaattaaaattacaaagcaagaaattataagtgaactgatatttattatcatttgaaataaatttaacttaagcgacaattatttgtgactttcattgcagaaaataaaaataacattatcgctataaattaaaatacataccgaaattcgtataatttcagcagttgttatttagaatgattaactggaccgcaactgaagcaagaatatcaggatgaagcttaccgcctcatcctgaatggtcattttaccagtgcgttaatgacggtttccatcgcctgcttttccagctcactgcgctgaatgcgtttattggctaatgctgtacgtaatacgcctgcgataacaatatgctttggttcctgccccagatcgcgcatttccagcacaactttaccgacaactctgcacatttctcggtacagttcatcctcttttgtccgatttcccattctttatacctatttatcatgccaactatcagcatatatcaatctaaccaattaaacaaaaatcaaacaaaatcagacaaataacgcgataaattattttaactgtagcaattgagcgatgatatatttatacaccggatgaactttcacttatcctcacactgacaacttcggcaccagacgttgcgcaaacagtgaagtttttgcgtaaccttttccctggaacgttaaatctttgataacaatttattgtctaacaagttgtatattttttgaaacgctgtttttgttttccttttggattaatttcagcgtataatgcgcgccaattgactcttgaatggtttcagcactttggactgtagaactcaacgactcaaaaacaggcactcacgttgggctgagacacaagcacacattcctctgcacgctttttcgatgtcacctatccttagagcgaggcaccaccactttcgtaataccggattcgctttccggcagtgcgcccagaaagcaagtttctcccatccttctcaacttaaagactaagactgtcatgaaaaagaccaaaattgtttgcaccatcggaccgaaaaccgaatctgaagagatgttagctaaaatgctggacgctggcatgaacgttatgcgtctgaacttctctcatggtgactatgcagaacacggtcagcgcattcagaatctgcgcaacgtgatgagcaaaactggtaaaaccgccgctatcctgcttgataccaaaggtccggaaatccgcaccatgaaactggaaggcggtaacgacgtttctctgaaagctggtcagacctttactttcaccactgataaatctgttatcggcaacagcgaaatggttgcggtaacgtatgaaggtttcactactgacctgtctgttggcaacaccgtactggttgacgatggtctgatcggtatggaagttaccgccattgaaggtaacaaagttatctgtaaagtgctgaacaacggtgacctgggcgaaaacaaaggtgtgaacctgcctggcgtttccattgctctgccagcactggctgaaaaagacaaacaggacctgatctttggttgcgaacaaggcgtagactttgttgctgcttcctttattcgtaagcgttctgacgttatcgaaatccgtgagcacctgaaagcgcacggcggcgaaaacatccacatcatctccaaaatcgaaaaccaggaaggcctcaacaacttcgacgaaatcctcgaagcctctgacggcatcatggttgcgcgtggcgacctgggtgtagaaatcccggtagaagaagttatcttcgcccagaagatgatgatcgaaaaatgtatccgtgcacgtaaagtcgttatcactgcgacccagatgctggattccatgatcaaaaacccacgcccgactcgcgcagaagccggtgacgttgcaaacgccatcctcgacggtactgacgcagtgatgctgtctggtgaatccgcaaaaggtaaatacccgctggaagcggtttctatcatggcgaccatctgcgaacgtaccgaccgcgtgatgaacagccgtctcgagttcaacaatgacaaccgtaaactgcgcattaccgaagcggtatgccgtggtgccgttgaaactgctgaaaaactggatgctccgctgatcgtggttgctactcagggcggtaaatctgctcgcgcagtacgtaaatacttcccggatgccaccatcctggcactgaccaccaacgaaaaaacggctcatcagttggtactgagcaaaggcgttgtgccgcagcttgttaaagagatcacttctactgatgatttctaccgtctgggtaaagaactggctctgcagagcggtctggcacacaaaggtgacgttgtagttatggtttctggtgcactggtaccgagcggcactactaacaccgcatctgttcacgtcctgtaatattgcttttgtgaattaatttgtatatcgcagcgccctgatgggcgctttttttatttaatcgataaccagaagcaataaaaaatcaaatcggatttcactatataatctcactttatctaagatgaatccgatggaagcatcctgttttctctcaatttttttatctaaaacccagcgttcgatgcttctttgagcgaacgatcaaaaataagtgccttcccatcaaaaaaatattctcaacataaaaaactttgtgtaatacttgtaacgctacatggagattaactcaatctagagggtattaataatgaaagctactaaactggtactgggcgcggtaatcctgggttctactctgctggcaggttgctccagcaacgctaaaatcgatcagctgtcttctgacgttcagactctgaacgctaaagttgaccagctgagcaacgacgtgaacgcaatgcgttccgacgttcaggctgctaaagatgacgcagctcgtgctaaccagcgtctggacaacatggctactaaataccgcaagtaatagtacctgtgaagtgaaaaatggcgcacattgtgcgccattttttttgtctgccgtttaccgctactgcgtcacgcgtaacatattcccttgctctggttcaccattctgcgctgactctactgaaggcgcattgctggctgcgggagttgctccactgctcaccgaaaccggataccctgcccgacgatacaacgctttatcgactaacttctgatctacagccttattgtctttaaattgcgtaaagcctgctggcagtgtgtatggcattgtctgaacgttctgctgttcttctgccgatagtggtcgatgtacttcaacataacgcatcccgttaggctccacggaatatttcaccggttcgttgatcactttcaccggcgttcccgtccgcacgctggagaacaaggctttaatatccggtgcattcatgcgaatacaccctgaactgacgcgcaaaccgacgctgtccggcgcactggtaccatgaatgaggtattcgccattaccatgcgcgaggcgcagtgcgtaacgtcctagcgggttatttggtccggcaggaacgactggcggtaatttaatgccacgctccagcgaacgctgacgaatgcctgccgtaggcgtccaggttgggttagggattttctgcccaacacgcgtttccatcaccggcgtttccagcccctgcaatccaatacctattggataaacctgcacaatattttctcccggcggataataataaaggcgcagctctgcaaggttaacgataatcccctgacgcggtgcatcaggtaataacagttgtgaaggaatagttatcgtcgtaccaggttttggcaccggggcgatagtgttattggcttcaaggatcaacattgccgcagtatcaaaacgtcgggcaatagcctgaaggtttttatccccttcttgcaccgtatacgtttgattttgcccaaccagtcggcttccggttggtggtagcggataatcaaccgcccaggcagcctggatggcgctaaaagcgccgataagcgtgagtgtaagcaaagacgcgcgtttcattgtaaacctcctgtatttgccggagactcacgctgaaacgtcggatggcgcttatgttcacctgaaaccaaaacactcctgtgcaggtcagtgtaaacattgaccatccggcaatgtgagccaaccggatgaaagctgtccttttagtttagctaagtgcagcggctttggcgcgaattgcgcgaatcatcgcttccagaccttgtgaacgagatggggtgagatgttgggtgagcgccattttttcaaaccacggacgcacatcgaaattgacaatatcctgcggcgtcatctgatcgtagagaataaagacgaccgcaataagccctttcacaatcgccgcatcgctgtcgccctgtaattcaataattccctgggcattctggcgcatgacaatccacacctgactctgacagccctgaatgctattttgtggacttctgtcttcgtcgcgtaattctggcagacgctggcccagctcaataatgtagagatatttctcttcccagttggcgcagcgtaaaaaattacgcagcaacttttctttatccggcaataaagccatagtgcctccctgttatcccagcaaacggtgaatacgttgcaggccggtcaccagacgatccacttcttcatgggtgttatacatggccagcgacgcccgacacatcgcagggacgttgtaataggccatcaatggcattgcgcagtgatgtccggtacgcacagcaatgccgtaattatcgagaaaactgccaacatcataggcgtggtgtttaccgagattaaaagcaataacgccaagcctgttttgtgggccatagagagtgagatccggtacagattccagctgtgatagcgcataatgcatcagattctgttcatactcggctatgttattaagccccagcgccgaaacatactccagcgccgcgccaagaccaatgatgcccccggtattgggtgtaccggcttcaaaccgccatggtgctttggtccaggtagtgccttcactcaggctgacggtggcgatcatagaaccgcccccttcccacggcggcatctcctgcaacaaggcttctttcacataaagaatgccaattccggtggggccatacagtttatgcccggagaacacgtaaaagtcgcaatccagcgcctgaacatccaccggatgatgcatcaccgcctgagcgccatccaccagcacttttgcgccatgctggtgcgcaagcgtgatcatttccgccagtggattttctgtgccaagcacgttggagacatgagtaattgccagcaggcgagttttctcatcaaacagcgtaggcagcgtctccagttgcaacgtaccatcgggattgagcgggatcacacgcagctctgcgccaacgcgtgcgcaaagcatctgccagggaacaatgttagcgtggtgctccatctgactgatgatgatgttatcgcccgcccgcacgttgctgttgccccagctattggcgaccagattgatcccttccgtcgtgccgcggacgaacaccagctcttccgccgaacgggcattaataaacagcgatgcccgcttgcgcacgttctccattttctcggtcgcctgggcgcttaaggtatgaataccacgatgcaccgccgcgtagccatgacgataaaactcggcctcggcgtcaatcacctggctcggtttctgcgcactggcggcgctgtcgagataagccagcggcaaaccgtttacctcacgcgaaagcaccggaaagtcggcccgcactttgtcgacggaaaaaatcatcttgcacctcctggcagccgttgaccgattcgggccagcacctgctgtttaagcccctcatcacgcagtgcttccgtcagttcggcagcgaaggcgtaaatgatcatctgctgggcatcctgctgattgatcccgcgcgagcgcagatagaatatctgttcatcatcaatacgccccaccgtcgcgccgtggctgcatttcacatcatctgcatagatttccagctgcggtttcgtatccacttccgccagtttgcccatcagcagattgttgttggtcatctgaccatccgttttgatggcgtgctgcgcgacgttgatcaaaccgttaaataccgcgcggcctttgtcgctgacgatagttttgtgcaactgtcggctgttacaaaaacctttattgtgttccagccaggtacgggtatcacacacctcgtttttcaccggcatcgccaggctattgatccgcagcgtgctgttttcgccattgagttgcgtactggtgttgtgtcgtaacactgcgccacccagcaggaaactgtggctaaatgcggtggcatcctcagccagcaacaaatcgttatgagcaaagtggtgactgagcgggttttcaaacgccagcttgatatgctgcaagtgggtattcgctgcgacgttgatagtgaaccgtgccccggtaaaatgacgagcatcattcaggctgacaaaatgttcgatcaccgttgcttcggcaccttccgccagatccagatgatgtcggtaatgggcagtgttcacctcttcacctgccacgccctgggtgatatgcattaacagcaatggctttgccggccgttgaccgcgcttcacggcgatatgcgtcacgctttgtgccaggctttccgtcaaatgcagaaacacttccgcctgaatagcgtcgggtaaaccctgacggtcgtcgttaatgctcacttcatatccgctgccttcagttgcatcgctcagtgcgggcacgtaacgcccatcgacaaacaccagccgcacggagtctaacgttaacgctaaggcatcacgctgctgtggggatatctctcccgcaatgctgacaaactggctattgatcagcccttccagcggcgtatatttccagttttcatgtttacgtgtcggcagtccggtacgcagcaattgttgtaaatgctgctgtgcttgcggggagcgttttgtcccttcagcttcaaacaagtgatgccactgttgcagcgcgttactgctgttcggtaagccagccataaccctgctcctccagttgtttgaccaacgtgaaatcgccggatttcacaattcgtccctgatatagcacatgaacgtaatcaggcttgatgtagtcgagaatgcgttggtagtgcgtaacaatgatgaatgagcgcttgccatcacgcagcgagttcacgccatcggcgaccacttttaatgcgtcaatatccagcccggagtccgactcatcaagaatgcataactccggttccagcaccgccatttgcaaaatatcgttgcgctttttctcgccgccggaaaaaccaacgtttaccgaacgggttaataaatcttccggcatcttcaggagagcgattttctcttccatcaaatcctgaaaatcaaagcggtcgagcgtttcctggccgcgatagctgcgcaccgcattaagtgccgtttgcaggaaaaactggttactgacacctggaatctccaccggatactggaaggccataaagatgccttcgcccgcgcgatcttccggcgacagcgcaagcaaatctttgcctttgaactcaaccgtgccgcccgtcacttcataatcttctcgcccggcaagcgttgccgataaggtacttttgcccgaaccgtttggccccataatggcgtgaacttcgccgggatgaacgtcgaggcttaatccgcgcaggatagctttatcttccacgctgacgtgtaaatctttaatacttaacatgtttattccttatccgacgctgtgttcaagactgatggcgaggagtttttgtgcttcaacggcaaattccaacggcagctccgagaacacgtctttgcagaaaccgttaacaatcatcgagatggcgtcttcttcgctgatcccgcgttgcaggcagtaaaacagttgatcttcaccaatacgtgatgtcgttgcctcgtgttccagttgcgcactattgttacgacactcaacatacgggaaggtatgcgccccacaattagcgccaatcagcattgagtcgcactgagtgaaattgcgcgcattggttgccgtcggcatgattttcactaagccgcgataactgttctgactatgtccggcagagatccctttcgagataatggtcgatttggtgtttttaccgatgtggatcatcttggtgccggtatccgcttgctgatgaccgctggtcagcgccactgagtaaaactcaccaatggagttatcgccgcgcaaaatgcagctgggatatttccacgtaatcgctgacccggtttctgattgcgtccatgacattttgctgttttcgccttcgcacaaagcacgcttggtgacgaagttgagaataccgccggtgttgttatcgccaggaaaccagttttgtaccgtggaatatttcacctcggcgtttttatggatgatgacttccaccactgccgcgtgtaactgatagctgtcacgcaccggagcggaacagccttcaatgtagctgacgtagctgtcttcgtcggccaccagaatggtgcgctcaaactgcccggttttttctgcgttaatgcgaaaataggtggaaagttccatcgggcagcgcacgcctttaggcacataaataaacgtaccgtcagaggctaccgccgcattaagcgcggcaaagaagttgtcattccccggcaccacggtgccgagatatttacgcaccagttccgggtgatcgtggatcgcctcaccaaaggaacagaaaataattccctgctccgccagtttttcgcgataagtagtggcaaccgaaactgagtcgaaaatggcatccaccgccacctctttgccttcccgcacgggaacgcccaactgctcaaacgccgcctccacctctttacttaaaaaggcgttcgcgccagtttgctgcaccgcgccaggttcagacgcgcaagtgtcgtcacaattaccgcacgatggtgctgagtagtagctgtaatcctgataattcagcttgtcgtagtgcgctttcaaccagtgcggttcttccatctccagccatgcgcgataggcgtttagacgaaactccagcatccactccggctcattacgcttcgccgaaattgcgcgcaccacctcttcgtttatcccctttgccagctcatcggtggctaactgggtgaagaatccttctttataattcagcgggccgccggtccaggttttgacatcgtcagttgcttcagtattacgagacatagtaccgcctataccccaaagctttcgccacagccacattcattctgggctttagggttgtgaaatttgaatatctgattaagtccttcacgaacgaaatcgacttccgtgccatcaataaacggcatcgcttgcagcgggacaaacagcttcgcgccgtcgtgttcaaacagcagatcgtctttgtccggctcgctaacactgtcgagcacatagccaaagcccgcgcagcccgtttgcttcacgcctaagcgcacgccgaccatacccggctgctttgccaccagctcacggatgtgtatcgccgctgtgggtgtcagcgttaagccttgccaggcgaaatcttgtgggttaaaggttcctgaatgcatgtccatcgatttacctcacttcatcgctttcagcgtataacagcatgttagtgataatgattatcagttcaacccagcaaacgcaggggctttaccgtaaaacatgctttttgcctgcttttaataagcatagaccctgatgtgtgggttaacaggcacgctaagaattaggtatctcattgttagataatggttattatctaaggagcattaaggctgtgatgaaaaagaaaaagttgtattgaaaatgactatttaagagataggtaaaaaagtgcagcgttcagaaataagaaaacccttaagtctgtgcgacacaggcttaagggtttctaccccatccggcgcttatctccggcactctcagtggcttagctcttgaaggggcgataagaataatctcataaagctaacccgccgttttaacacaaactgcgattagtattatttttgaacaatatcaggcggtagataagcagtattaagaaggtcatcgaacctggacggaggttaatccaggtcgatttggcgaacttgcggcattaagtcaggatcaatgcacgcccagacgccaggcaaagtagatttcttcttttaattcagcagaagagagagtaagcaggtcagcaaattcaagttctagttgtttcagacgtttgagatattgggcaggtgaaagattgctctggtcacggcgtaaaaattcaatggccagctgggtgggatcaagttgagtagacatagcatcctcgcttttagacaagacctgcacagtataccaccgtttactgtgcagataatgaccaaaagcaatatgcgtcacacttttctggtgacaacgtcacaaaatggcggtcgtcaatcgtgacgaacagcacaaacgccctttctcatcgaagatttcaatctgccagacctggtgacgcgaaccgagatgcaacggtttgcatacgccgcgcacccgcccttctcgtgccgagcggacgtggttagcattgatttccagaccaaccactttttgctcaccttcggtacataaataaccggcaacggaaccgatactttcggccagtaccacggatgctcctccatgcagcaacccgaaaggctgctttgtccgcgagtctactggcattgtcgcttcaagggtgtcatcaccaatatgttcaaagcgaatatccaggaaccccaccatgtttccttcacccatagcattcagtgcttccagggtgattttccgtttccatatcatttaataatctccagtaaagcctgcacaggatggcgtacccccgtgccttcaacccgttttacctggctacggcaggaatatccggtcgccagacagcggttacgcggcagtcgctgcatagcctgatgccaggataactcatagatcccgagcgaattttcatggtttttcgcttcatgtccgtaagtccctgccatgccgcagcaacccacgctgacattttccagtttcgcgccaaaacgggcaaatatcgcggcccattgtgctggcgcacccggcaaggcggtaacttcggtacagtgaccaaagaaataccatgattcaccgctgactgtagccactggctgtgactcaagtgcgcttgccagccattcattcgccagtaagacgttaaactcgccacgctcctcgcccagcgccagtttatattcatcgcgataacaaagtaccagcgccggatcgacgcccaccattggcatacccagcttcgccatacggttgaggaaatccgccgtctttttcgccgtcttcgcaaaacgattaagaaaacctttaatatgctgggctttgccatttggcgaaaatggcagtaacacaggctggaaacctaatttttcgaccagacggacaaaatccgccaccacttgcgcatcgtaatagctggtaaaggggtcctgcaccaccaacactgtgcgcgctttctgctctgcattgagagattcaagctgttccagcgtcatgtttgccgagcgatgccccaccatttgttgttgtagcgaggggaccgacagcagcggcaaatcaaccatgccgatatgtttttccgagagtttgcgcaccagcggctggttaatgaagaagttaaaggttttcggcgcgcgtgccatcagcggcgcgtagctctcgaccgtagcgacgaggtggtcgcgcagcgggcgtaaataacgggtgtgatagagctgcagaaaacgagagcgaaactccggcacatcaattttgatggggcactgggtcgaacacgctttacaggccagacagcccgacatcgcctctttgacttcgtgtgagaagtcatattcgcctttattcgcatgccagctattgcgcgtgcgggcaattaacgtccgcaaactgacgccggattcaggcagttcttgttccagtttgagtggatcaacgccgcgatccgccaacaaacgcagccattcacgcaccagcgttgcgcgccctttcggtgaatgaatccggttctgggtgatcttcatcgacggacacatcggactacgggcatcaaagttgaagcataaaccgttgccgttacactccatcgcaccgcgccactgctggcgtaccgcaatggggatctgccgatcgaatgtaccgcgcttcaccgcgtccactttcatcatcggcgcatcgagaccttctggcgggcaaatcttccctgggttgagtcggttatgcgggtcaaatgccgctttcactttgcgcagttctgcaaaaagttcctcaccgaaaaacgccgggctgtattcagcgcgaaaacctttgccgtgctcgccccacaacaaaccaccgtatttcgcagtcagcgccaccacgtcatcagagatttgcttcatcaaaatctcttgttgaggatcgcacatatccagcgctggacggacgtgcaagacacctgcgtcgacgtgaccgaacataccgtagcttaagccgtggctgtcgagcagcgcgcgaaattcagcaatataatccgccaagtgttccggcggtacgcaggtatcctcagcaaacggaattggcttagcggcacctttggcattgccaagcagaccaacggcttttttgcgcattgcatagatacgttcaacccccgccagctcacggcacacctgccagccgatgacacctgcttgatgactggcgatcagctcatccaaccgcgcacagagtgcatttacccgctcatcaatcagcgcctcatcatcaccagcaaattccacaatgttcagcccgagcatctcttggtcaggcacatcggtaatcaactcgctgacggaatgccagacaatatcttcccgcgccagattcagcacttttgagtccaccgtctctaccgaaagcgcccgcgcctcaaccataaacggcgcgttacgcagcgcagagtcaaaagagtcatatttgacgttcaccagacggcgcactttaggcaagcgtgtaatatccagccgcgcttcggtaataaaggccagcgtcccttctgaacccgtcagaatgcgcgtcaggtcgaactcggtcatctcatcgttaaagacatgacgcagatcgtaaccggtaagaaagcggttaagtttggggaagttgtcgataattaactggcgttgctgacggcaacgttgataaaccgtgttataaattcgcccgattgtggtattggatttacccagcgtttccgccaattcgacgggtaaaggttgcgtatcgagaatatcgccccccaacaacaccgcgcgtacgccaagtacgtgatctgacgttttgccatagaccagcgatccctgaccggatgcatcggtattgatcatcccaccgagcgttgcccggttgctggtcgaaagttccggcgcaaaaaagtagccgaacggtttcaggtactgattgagttgatcttttatcaccccggcctcaacgcgcacccagccctcttcagggttaatttcgatgatgcggttcatatggcgggacatatcaacaataatcccctggttgagcgcctgaccgttagtgccggtgccgccgccgcggggggtaaagatcagcgatgaatagcgttcctgcgcggcaagacgggcgatcagcgccacatctgcggttgaacgcggaaataccaccgcatcggggagaagttggtaaatactgttgtcggtcgacattgtcagacgatcggcataacttgtcgccgtatcgccggtaaaaccttgttgctccagctcttgcaaaaaattaagcaccagttgaacgacgccgggtgcctgggaaatctgtggaatcattatattgaccctttcctgcggtctgtgatgtaggtcgatacactattctttcaggctgctgcaatagcgcactgaaaggtgatgtttgtttactctatggatttcgtgttgcaggaaggcggcaagcgagtgaactccaggagcttacaatagtaagtgactggggtgaacgaacgtagccgcagcacatgcaacttgaaatacgacgagtaaatcgtttgcgtgttgcctgagttgttgtaccacatttttttctaacacgcccatcagaattaagggcagaatcggcctgttaaaaaccgctgaaattgctcatcattatgcaggtgagtttcgcgtgttcacgtcgcgtcgacgatttgacgcacaaaaaaggtgaaaagtagttatggtaaatgttcgtcagcccagggatgtcgcacaaattctgctttcggtgctgtttttagccatcatgattgtggcatgtctgtggattgttcaaccctttattctcggctttgcatgggccggtacggtggttatcgccacctggccggtattgttacgtttgcaaaagatcatgtttggccgccgctctctcgccgttctggtgatgacgctgttattagtgatggtgtttatcatccctattgctttgctggttaacagtatcgtcgacggcagcggcccgctaattaaagccatttccagcggtgacatgacgttacccgatctggcgtggcttaataccattccggtgattggcgcgaagctgtatgcaggctggcacaacttgctggatatgggggggacggcgatcatggcgaaagtccgcccttatattggcaccaccaccacctggttcgttgggcaggcggcgcatatcgggcgctttatggtgcattgtgcgctgatgcttctcttcagtgccctgctgtactggcgcggtgaacaggtggcacaaggcattcgccattttgcaacccgtctggcaggcgttcgcggagatgccgccgtgctgctggcggcacaggctatccgcgcggtggcgctgggtgtggtggtgacggcgttagtacaggcagtgcttggcggtatcggcctcgccgtatccggcgtaccttatgcaacgttgctaacggtgttaatgatcctctcctgccttgtccagcttggcccgttgccggtactgattccggcgattatctggctctactggactggcgataccacctggggaacggtattgttagtgtggagcggtgtggttggcacgctggataacgtcatccgcccaatgttaattcgcatgggtgccgatttaccgctgatcctgattctctctggcgttattggtggtttgattgctttcgggatgatcggtctgtttattggtccggttctgttagccgtttcctggcgtctgtttgccgcgtgggtggaagaagtcccgccgccgacggaccaaccggaagaaattctcgaagaacttggcgaaatcgagaaaccgaataagtaatttctcatcaggcggctctgccgcctgattgttaaccaccgctaattgatatttgcttgctcttccccatattttcctgcttaccgccattcagctggtagtacctgtcgcaaattctttacagtttttaaactaatgagacgaatctgatcgacgcaaaaagtccgtatgcctactattagctcacggttataaatcaacatattgatttataagcatggaaatcccctgagtgaaacaacgaattgctgtgtgtagtctttgcccatctcccacgatgggcttttttttaacatttttccgcttcgctacctcgcccctcactctttccaataatgttgcacaagatactgtgactctcttcaagccgtcagcaggctgataatgttatttatattttattgtttatttcatgcagccattacacgatgaacgcttatgaactccaggcactccgccatatttttgccatgactattgatgaatgcgcgacctggattgcccagaccggtgacagtgaaagctggcgtcagtgggaaaatggcaagtgtgccattcctgatcgtgtagtcgagcaactgttggctatgcgtcagcaaagaaaaaaacatcttcatgccatcatagagaaaataaataaccgcatcggcaacaacaccatgcgttttttccccgacttaaccgcatttcaacgagtctaccctgatggcaattttattgactggaagatctatcaatcggtagctgctgaattatatgcacacgatctggagcggctttgttaatttttccacagaaaggaattgtcgttgttacaacaataatgaacggatgctgacacaacatcgcttcactttttaaagcacctttgctaagtagaacctatgaaaaatccctatttccctaccgcacttgggttgtattttaattacctggtgcatggtatgggcgtcattttgatgagcctgaatatggcctcgctggagacgctttggcagactaatgccgcaggcgtctcaatagttatctcatcgctgggtattggtcgattaagtgtcttgctttttgcaggattattatccgatcgctttggtcgccgcccttttatcatgctcggaatgtgctgctatatggccttcttttttggcatcctgcacaccaataacatcattatcgcttatggtttgggctttctggcgggaatggcaaacagttttctcgatgcaggcacctatcccagtttgatggaagcttttccacgctcaccgggtacagccaatattttaattaaagcatttgtttccagcgggcaatttttattaccgctaatcatcagcctgttagtgtgggctgaactgtggttcggctggtcctttatgattgctgcaggcattatgtttattaacgctctgtttttataccgttgtacgttcccaccccatccgggtcgtcgcttacctgtcataaagaaaaccaccagctctacggaacatcgctgctcaataatcgatttagccagttataccttatatggttatatctcaatggcaaccttttatctggttagccagtggctggcacagtacggacaatttgttgcaggcatgtcatacactatgtcgatcaaactactcagtatctacaccgtgggttcgctgctttgtgtatttatcaccgctccactcattcgtaataccgttcgcccaacaacattactgatgctgtacacctttatctcatttattgctctgtttgccgtctgtctgcatcccacattttatgtggtgataatatttgcttttgtcattggttttacctctgctggaggtgttgtgcaaattggcctgacattaatggctgaacgtttcccctacgctaaaggtaaagctacagggatctattacagtgcgggcagtattgcgacctttactattccgttgattacggctcatctgtcccaaagaagtattgccgatattatgtggttcgataccgccatcgctgccatcggctttttactggcactgtttatcggcttacgcagccgcaaagaaacgtggcatcactcgctaaaggaaaatgtcgctccgggtgggtaatgcaatattcttttcaggtcatgcaagatcttacggataaataactctttctgcgctgactaaggaaaatcgcgatcaaaaacaaactatgacatgcaatattcctggaaacataaactttatgccatgtacccagggaaaatcatcttcagtatagtaattatgtaaaccgtcggagaacaatacgtacggtaacgaaattatctttcagcaaggagctgtgaaaatgtctcaaaataaggctttcagcacgccatttatcctggctgttctttgtatttacttcagctatttcctgcacggcattagtgttattacgcttgcccaaaatatgtcatctctggcggaaaagttttccactgacaacgcgggcattgcctatttaatttccggtatcggtttggggcgattgatcagtattttattcttcggtgtgatctccgataagtttggtcgtcgggcggtgatattaatggcagtaataatgtatctgctattcttctttggtattcccgcttgcccgaatttaactctcgcctactgtctggcagtgtgcgtaggtatcgctaactcagcgctggatacgggtggctaccctgcgctcatggaatgctttccgaaagcctctggttcggcggtcatactggttaaagcgatggtgtcattcggacaaatgttctacccaatgctggtgagctatatgttgctcaataacatctggtacggctatgggctgattattccaggcatcctatttgtactgatcacgttgatgctgttgaaaagcaaattccccagccagttggtggacgccagcgtagctaatgaattaccgcaaatgaacagcaaaccgttagtctggctggaaggtgtttcatcggtactgttcggtgtagccgcattctcgaccttttatgtgattgtggtatggatgcccaaatatgcgatggcttttgctggtatgtcagaagctgaggcattaaaaaccatctcttattacagtatgggctcattagtctgtgtctttatttttgccgcactactgaaaaaaatggtccggcccatctgggctaatgtatttaactctgcactggcaacaataacagcagccattatctacctgtacccttctccactggtgtgcaatgccggagcctttgttatcggtttctcagcagctggcggcattttacagctcggcgtttcggtcatgtcagagttttttcccaaaagcaaagccaaagtcaccagtatttatatgatgatgggtggactggctaactttgttattccactgattaccggttatctgtcgaacatcggcctgcaatatatcattgttctcgattttactttcgcgctgctggccctgattaccgcaattattgtttttatccgctattaccgcgttttcattattcctgaaaatgatgtgcggtttggcgagcgtaaattttgcacccggttaaacacaattaagcatagaggttaaaggagttaattatggatgttaccgcaaaatacgaattgattgggttgatggcctatcctatccgccacagtttatcgcccgaaatgcagaataaagccttagaaaaagcgggattgccatttacctatatggccttcgaagtggataacgatagctttcctggagcaattgaaggattaaaagccctcaaaatgcgcggaactggtgtatcgatgccgaacaaacaactggcgtgtgaatatgttgatgaattaacaccagctgccaaactggtgggggccatcaacaccatcgttaatgatgatggctatctgcgtggctataacaccgacggcacgggccatattcgcgccattaaagagagcggttttgatatcaaaggcaaaacgatggtgctgttaggggccggtggtgcctcaacggcaattggcgcgcagggggcaattgaaggtttaaaagaaattaaactctttaaccgtcgggatgagttcttcgataaagccctcgccttcgcgcagcgggttaatgaaaacaccgattgtgtcgtcacggtcaccgatctcgccgatcagcaagcctttgctgaagccctggcttccgccgacattttaaccaatggcacaaaagtgggtatgaaaccccttgagaatgaatcattggttaatgatatcagtctgttacatccgggacttctggtcactgaatgcgtgtataacccgcatatgacgaagttattgcagcaggcgcaacaagctggttgcaaaacgattgatggatacggcatgttgttgtggcaaggggctgaacagttcacattatggactggcaaagatttccctctggaatatgttaaacaggtcatggggttcggtgcctgacaggctgaccgcgtgcagaaagggtaaaaaatgaaaaccgtaactgtaaaagatctcgtcattggtacgggcgcacctaaaatcatcgtctcgctgatggcgaaagatatcgccagcgtgaaatccgaagctctcgcctatcgtgaagcggactttgatattctggaatggcgtgtggaccactatgccgacctctccaatgtggagtctgtcatggcggcagcaaaaattctccgtgagaccatgccagaaaaaccgctgctgtttaccttccgcagtgccaaagaaggcggcgagcaggcgatttccaccgaggcttatattgcactcaatcgtgcagccatcgacagcggcctggttgatatgatcgatctggagttatttaccggtgatgatcaggttaaagaaaccgtcgcctacgcccacgcgcatgatgtgaaagtagtcatgtccaaccatgacttccataaaacgccggaagccgaagaaatcattgcccgtctgcgcaaaatgcaatccttcgacgccgatattcctaagattgcgctgatgccgcaaagtaccagcgatgtgctgacgttgcttgccgcgaccctggagatgcaggagcagtatgccgatcgtccaattatcacgatgtcgatggcaaaaactggcgtaatttctcgtctggctggtgaagtatttggctcggcggcaacttttggtgcggtaaaaaaagcgtctgcgccagggcaaatctcggtaaatgatttgcgcacggtattaactattttacaccaggcataagcaataatatttcggcgggaacaccctccccgccgaactaaaaaatatattcaatcgtatttaataaaaatatttcgtgagtctctgtgcgctaattctccatttggcgtagggaaaatcacatctgaatcaggaattaacaatgaaacctgtaaaaccacctcgtattaatggacgagtgccggtcctgtcggcacaggaagcggtgaattatattcccgacgaagcaacactttgtgtgttaggcgctggcggcggtattctggaagccaccacgttaattactgctcttgctgataaatataaacagactcaaacaccacgtaatttatcgattattagtccaacagggcttggcgatcgcgccgaccgtggtattagtcctctggcgcaagaaggtctggtgaaatgggcattatgtggtcactggggacaatcgccgcgtatttctgaactcgcagaacaaaataaaattattgcttataactacccacaaggtgtacttacacaaaccttacgcgccgccgcagcccaccagcctggtattattagtgatattggcatcgggacatttgtcgatccacgccagcaaggcggcaaactgaatgaagtcactaaagaagacctgattaaactggtcgagtttgataacaaagaatatctctattacaaagcgattgcgccagatattgccttcattcgcgctaccacctgcgacagtgaaggctacgccacttttgaagatgaggtgatgtatctcgacgcattggttattgcccaggcggtgcacaataacggcggtattgtgatgatgcaggtgcagaaaatggttaagaaagccacgctgcatcctaaatctgtccgtattccgggttatctggtggatattgtggtggtcgatccggatcaaacccaactgtatggcggtgcaccggttaaccgctttatttctggtgacttcacccttgatgacagtaccaaacttagcctgcccctaaaccaacgtaaattagttgcgcggcgcgcattattcgaaatgcgtaaaggcgcggtggggaatgtcggcgtcggtattgctgacggcattggcctggtcgcccgagaagaaggttgtgctgatgactttattctgacggtagaaacaggtccgattggcggaattacttcacaggggatcgcctttggcgcgaacgtgaatacccgtgccattctggatatgacgtcccagtttgatttttatcacggtggcggtctggatgtttgttatttgagttttgctgaagtcgaccagcacggtaacgtcggcgtgcataaattcaatggtaaaatcatgggcaccggtggatttattgatatcagtgccacttcgaagaaaatcattttctgcggcacattaactgcgggcagtttaaaaacagaaattaccgacggcaaattaaatatcgtccaggaaggacgggtgaagaaatttattcgggaactaccggaaattactttcagcggaaaaatcgctctcgagcgagggctggatgttcgttatatcactgagcgcgcagtattcacgctgaaagaagacggcctgcatttaatcgaaatcgcccctggcgtcgatttacaaaaagatattctcgacaaaatggatttcaccccagtgatttcgccagaactcaaactgatggacgaaagattatttatcgatgcggcgatgggttttgtcctgcctgaagcggctcattaacaggagtataatgatggatttttctttaactgaagaacaagaactgctgctggccagtattcgcgaactgattacgactaactttccggaagagtatttccgcacctgcgatcaaaacgggacatatccgcgtgagtttatgcgggcgctggcggataacggtatttccatgcttggcgtgccggaagaatttggtggtatccctgcggattacgtcacccaaatgctggcgctgatggaagtgtcaaaatgcggtgctccggcatttttaattaccaacggtcaatgtattcacagtatgcgccgtttcggttctgcagagcagctacgtaaaacggcagagagcaccctggaaacgggtgatcccgcctatgccctggcgttgacggaaccaggtgctggctcagataacaacagtgccactaccacttacacgcgtaaaaacggcaaggtctacatcaacggacaaaaaacctttattaccggtgcgaaagagtacccgtatatgctggtgctggcgcgcgatccgcaaccgaaagatcccaaaaaagccttcaccctgtggtgggtcgactccagtaagcccggcattaagattaacccgctgcataaaatcggctggcatatgctcagcacctgcgaagtctatctcgacaacgtggaggttgaagagagcgacatggtgggcgaagaaggaatgggtttcctcaatgtgatgtacaactttgagatggagcgcctgatcaacgccgcgcgcagcaccggctttgccgaatgcgcctttgaagatgccgcccgctatgccaaccaacgtatcgcttttggtaagcccattggtcataaccagatgatccaggaaaaactggcgctgatggcgattaagatcgacaacatgcgcaacatagtgctgaaagtggcatggcaagccgatcagcatcagtcactgcgcaccagcgcggcgctggcaaaactgtactgtgcacgtaccgcaatggaagtcattgatgatgcgattcaaatcatgggcggtctgggctataccgatgaggcgcgcgtctcccgcttctggcgtgatgtccgttgtgaacgtatcggcggcggtacagacgaaattatgatttacgtagcaggtcggcagatcctgaaagactatcagaacaaataatctgcaggcggcgcagcttcttaacaaactgcgccgccagatttatccaacaagacttaccggttgaggaaattcagataggatttcttgttccgcaaaacagtttttaaattgtctacggtaatcgctgggcgaacaaccgacatggcgcaaaaacagtttggcaaagtgatcgacattttcataacccacacgccaggagatctctgcctgtgataattcagtattagtgagtgaccattttgcttccgtcatacgccgttgaataacatagttaataggggaaatacgatactctttggtaaattcatggcaaatataactgacgctggcacgaaattttttcgataactgttctaaagtgattttttcgcgataattattattcagatagaaaagaatatcttttatcagaacatcttttttaatatacccctgctccgaacgataagcatttttaaaattttcgtagtaaagaatggctaacgtataggcaaatgcatcccataacgaagatgtttggctatttttactttgcggcaaaatcacacttagctcattaaataaggtttttatgacttcttttccctgccccgcggcaattaccggacaagaatgcggttgcagtagctgattttcctcagccccctgaaactgaaagccgtacagcgcacaggtacacgtcgttgccggatcgttaacgtcagaggccaccgcatgcagcctgccgcgttctatcaccacaatgtcatccgcatgtgcgacatataacgaagaatcgatggtaaaccttgcaacccctttcttgacgtaaatcaactcggtttcattgtcatgaacgtgatgtccggactcccattttggatcatcgctaaatgcaaaacatgaaagccgtggcgttttaccggcgacaaacagcgtttcactggcgttatcaaaacagcgttgatacatgacaacctccctattccatgagcaagcaaaaacaatatatgccggataaaatacggcgtgtattgcggttatacaaccgcgtttagcgagagctaaacaagattatttacactgaatgcaagattgtacggtcatggaataactatattgccgcaaattgcacttttgttttagcgatcgcattttttttgcaagattgttggcaaggaaaacagcttgctccgtcgaaaaccccgcaccgctatcgcacactattttcaggccatttttaccttccatcggagatggttccgtatgcgactcacaggagaaatcatgaaaataataacctgctttaagctggtgcctgaagaacaggacattgttgtcactccagaatacaccctgaatttcgacaatgccgacgccaaaatcagccagttcgatctcaatgccattgaagctgcaagccagctcgcaacagatgacgatgagatagccgcgctgaccgttggcggctcattgttgcagaactcgaaagtgcgcaaagacgtgctatcccgcgggccgcacagcctgtatttggtgcaggatgcgcaacttgaacatgcactgcctctcgataccgcaaaagcgctggcggcagcaattgaaaagatcggcttcgatttactgatctttggtgaaggttccggcgacctttatgcccagcaggttggcttgctggtcggagaaattctgcaacttccggtgattaatgcagtgagtgctattcagcgtcagggcaatacactggtgattgaacgcacgcttgaagatgatgttgaagttattgaactctctgttccagccgtgctctgcgtcacctccgatattaacgtgccacgcattccttcgatgaaagccattctcggcgcgggtaaaaaaccggtaaatcagtggcaggcaagtgatattgactggagccagagcgcgccacttgctgaactggtcggcattcgcgtaccgccgcaaacagaacgtaagcacatcattatcgataacgattcgccggaggccattgccgagctggcggaacatctgaagaaagccctgaactgaagcctacggagaagaaacgatgagtcaattaaacagcgtctgggtctttagcgataatcctgaacgttatgctgaactgtttggcggcgctcagcaatggggccaacaggtgtatgccattgtacaaaataccgaccaggcgcaggcagttatgccttatggtccaaaatgtctttatgttcttgcgcaaaacgacgcgctgcaacgcactgaaaattacgccgaaagcattgctgccctgctgaaagataaacaccccgctatgttgctgttggccgcgacgaaacgtggtaaagcgctggcagcacggttaagtgtgcaactgaatgcggcgctggtgaacgatgccacggcggtggatattgtcgatggtcacatttgcgccgaacaccggatgtatggcgggttagcgttcgctcaggaaaagatcaacagcccgctggcgatcattacccttgcacccggtgttcaggaaccgtgcaccagtgatacctctcatcagtgcccgacagaaacggtaccttatgttgctccgcgtcatgaaattctctgtcgcgaacgccgtgcgaaagccgcaagcagcgtggacctgagcaaagcaaaacgtgtggttggcgtcggtcgtggactggcggcgcaggatgacctaaaaatggtccacgaactggcggcggtgctgaatgctgaagtcggctgttcacgtccaattgccgaaggcgagaactggatggagcgtgaacgttatatcggtgtctccggcgtgttgctgaaatccgatctctacctgacgctggggatctccgggcagatccagcatatggttggcggcaacggcgcaaaagtgattgtcgccatcaataaagataaaaatgcgccaatcttcaactatgccgactacggtctggtgggcgatatctacaaagtcgtccctgccctgattagccagttgagccgctaattcccctttcaaccacatctcccgctgtaaacgcagcgggaagggagcataacgcatgtcggatgacaaatttgatgccattgtggtcggtgcgggcgttgctggtagcgttgccgcactggtcatggcacgagccgggctggatgtcctggtgatagaacgcggcgacagtgccggatgtaaaaacatgaccggcgggcgtctttatgcccacacacttgaagcaatcattccaggctttgcagtatcagcgccggtagaacgcaaggtcacacgcgagaaaatctccttcttaaccgaagaaagcgccgttaccctcgattttcaccgcgagcagccagatgttccgcaacacgcatcttataccgtattgcgtaatcgtctggacccgtggttgatggaacaagccgagcaggcgggcgcgcagtttatcccaggcgttcgcgtcgacgcgctggttcgtgaaggaaacaaggtcactggcgtgcaggctggggatgatattctcgaagcgaatgtggtgattctggctgatggcgttaactcgatgcttggccgctcgctgggaatggttcccgcttccgatccgcatcattacgctgttggtgttaaagaggttattggcctcacaccagaacagatcaacgatcgctttaatattacgggcgaggaaggtgccgcctggctgtttgccggttccccttctgacggcctgatgggcgggggatttctctataccaacaaggattccatatccttggggctggtttgtggattgggtgatatcgcccatgcgcaaaaaagcgtgccgcaaatgctggaagattttaaacaacaccccgccattcgcccgctgattagcggcggcaaactgcttgaatattccgcgcatatggtgccggaaggcggtctggcaatggtgccgcaactggttaacgagggcgtgatgatcgttggtgacgccgcaggcttctgcctgaatttgggttttacggtccgcggcatggatttagccattgcatcggctcaggctgccgccacaacggtgatcgccgccaaagaacgcgcggatttctccgccagcagtctggcgcaatacaaacgtgagctggaacaaagctgcgtcatgcgtgatatgcagcattttcgcaagatcccggcgctgatggaaaacccgcgcctgtttagccaatacccacgaatggtagccgacatcatgaacgagatgttcaccatcgacggcaaaccaaaccagccggtacgaaaaatgatcatgggacatgcgaagaaaattgggctgatcaacttgctgaaagatggcattaagggagcaaccgcgctatgagccagaacgctacggttaacgtcgacatcaaattaggcgtcaataaattccatgttgatgagggccacccgcatatcattttggcggcaaatcccgatatcaatgaattccgtaaattaatgaaagcctgccctgccggactttataagcaggatgacgccggcaacattcattttgattctgccggttgtctggagtgcggcacctgtcgggtgttgtgcggtaacactattctcgaacagtggaaatatcccgcaggtaccttcggtattgatttccgttacggctaatcacgcatcccacaggcccgcacatcgggcctgatgttctgtttcgagagtccaaaatgaaagtgacattaacgtttaacgaacaacgtcgtgcggcgtatcgtcagcaagggctatggggcgatgcttcgctggccgattactggcagcagaccgctcgtgcgatgccagacaaaattgccgtggtcgataatcatggagcatcgtacacctatagcgcactcgatcacgccgcgagctgtctggcaaactggatgttagcgaagggtattgaatcaggcgatcgcatcgcatttcaactgccaggctggtgtgaatttaccgttatctatcttgcctgcctgaaaatcggtgcggtttccgtaccgctgttgccttcctggcgggaagcagaactggtgtgggtgcttaataagtgtcaggcaaaaatgttctttgcaccgacgttgtttaaacaaacgcgtccggtagatttaatcctgccgctgcaaaatcagcttccacaactacaacaaattgtcggcgtggacaaactggctcccgccacctcttccctctcattaagtcagattatcgccgacaataccccactgaccacggcgataacgacccacggcgatgaattagctgcggtgctgtttacctccggaaccgagggtctgccaaagggcgtgatgctaacgcataacaatattctcgccagtgagcgggcttattgcgcgcggctgaatctgacctggcaggatgtctttatgatgcctgcgccactcggccacgcaacgggctttctgcatggcgtaacagcaccatttttgattggcgctcgcagcgtgttgttagatattttcactcctgatgcgtgtctcgcgctgcttgagcagcagcgttgcacctgtatgctcggcgcaacgccgtttgtctatgatcttttgaatttactagagaaacaacccgcagacctttcagcgctgcgcttctttctttgcggcggtaccacaatccccaaaaaagtggcacgtgaatgccagcagcgcggcattaaattattaagtgtttatggttccacagaaagttcgccgcatgcggtggtgaatctcgatgatcctttgtcgcgctttatgcacaccgatggttacgctgccgcaggtgtagagattaaagtggtcgatgacgcacgcaagaccttaccgccaggttgcgaaggtgaagaagcctcgcgtggccccaatgtgtttatgggatattttgatgaacctgaattaaccgcccgtgcgctggatgaagaaggctggtattacagcggcgatctctgccgtatggatgaggctggctatataaaaattaccggacgcaaaaaagatattattgtccgcggcggcgaaaatattagcagccgtgaagtggaagatattttattgcagcatcctaaaattcacgatgcctgtgtggttgcaatgcccgatgaacgtttaggtgaacgatcatgcgcttatgtcgtgctgaaagcgccgcatcattcattatcgctggaagaggtggtggctttttttagccgtaaacgggtcgcaaaatataaatatcctgaacatatcgtggtaatcgaaaaactaccgcgcactgcctcaggtaaaatacaaaagtttttgttaagaaaagatattatgcggcgattaacgcaggatgtctgtgaagagattgaataagtatcatcttcggggatcacataaccccggcgactgaacgccgccggggatttattttatttcttcagttcagccaggcttaaccaggtttgcaccacggtgtccgggttcagagacaggctatcgatcccctcttccatcaaccatgcggcaaagtcttcgtggtcggacggaccctgaccgcaaatcccgacatatttgccctgtttcttcgcggcacgaatcgccatcgacagcagtgctttcaccgcatcgttgcgctcatcgaacagttcagacaccacgccggagtcgcggtccagaccgagcgccagctgcgtcatatcgtttgagccaattgagaagccgtcgaaatattcgaggaactgctctgccagcaaggcgttggacgggatttcacacatcatgatgattttcagcccgttctcgccacgtttcagcccctgacgcgccagttcttcaaccaccgctttcgcctgatctacggtacgcacgaacgggatcatgatctcaacgttggtcagtcccatgtcgttgcgcacacgtttcactgcttcacactccagcgcgaaacagtcgcggaagctgtcggaaacatagcggcccgcgccacggaagccgagcatcgggttctcttcatctggctcgtaacgctcaccaccgaccaggttggcatattcgttcgatttaaaatcagagagacggacaatgacgcgcttcggataaaacgcggcacccagcgtcgcgatcccttcagtcagacgaccaacgtaaaattcacgcggagaatcaaaacctttcatcatctcgcggatttcgttttgcaactgcggttcctgatcgtcaaactcaagcagtgcgcgtgggtggacgccaatcatacggttgatgataaattccagacgcgcaaggcccacgccttcgttcggtaggcaggcgaagtcgaaagcacggtccgggttaccgacgttcatcatcactttcaacggcagatccggcatcgtttctacgctggagcttttcacgctaaattccagcaactccgcatagacgtaaccggtatcaccttcggcacaagaaacagtgacgttctcaccgtctttcatccgttctgttgcatctccacagcccactaccgccggaatgcccagttcacgagcgatgatcgccgcgtgacaggtacgaccgccacggttggtgacgatggcagatgctttcttcatgatcggttcccagtccgggtcggtcatgtcagtaaccagcacgtcgccaggttcgatgcggttcatttcgctgatgtcatggatgactttcaccggacccgcaccgatgcgatgaccgatagcacggccttcggcgataatcttaccctgtgaatgcagcgtataacgctccatgacctgaccgcgtgagcgcacggtttccggacgcgcctgcacaatgaacagtttaccggtgtggccatctttcgcccactcaatatccatcgggcgaccgtagtgtttctcaatttgtacggcctgttttgccagttcctgcacttcttcgttggtcagcgagaagatgtcacgctgttcctgcggtacgtcttcgattttaacctgcttgccgtgctcctgggtcggcgcgtaaaccatgcggatttttttcgaccccatggtgcggcgcacgatagccgggcgattcgccgccagtgtcggtttatgcacgtaaaactcatccgggttaaccgcaccctgcacgaccatctcaccaaggccccatgcggaagtgataaacaccacctggtcaaagccggattcggtatcaatggagaacatcacgccagatgatgcgaggtcagagcgcaccatccgctgaacaccggcagagagcgccacgccacggtgatcgtaaccctggtgcacacgataagagatggcgcgatcgttaaacagagaagcaaatacatgcttcactgccacgagaacggcgtcaaaaccctgaacgttgaggaaggtttcctgctgaccggcaaaggaagcgtccggcatatcttctgcggtggcggaggagcgcaccgcaaaagaggcgttttcgtcatcggcggaaagctgagcataggcttcgcggatggcgttttccagctcaggctggaagggagtgtcgataatccactggcggatttgcgcgcccgctttcgcaagctgggtaacatcgtcaatatccgttttatccagcagttcataaatgcgctggtttacgccgctttggtccagaaactggttaaacgcgtcggcggttgtggcgaaaccattcggaacggaaacacccattccggaaaggttagtaatcatttcacccagggaggcatttttgcccccaaccctgtctacatcattcatgccgagttggttataccaaagcaccagcggtgacgagccattgttggacatcgaacaatccttttgtgataaatgaacggtttgagaaacacatttctgcgcatttatctttgcatatttaaccggatgaaaaaaacggtgaatcgttcaagcaaatatatttttttattttttaagactgatcccagcgttgcgcaaatctgctctcttcgacaatttccacataaaccatcggtataaacgaaaccataaaaatgaaatactgttttcataaaaaataaaattgaaggttcattttataaaccagacataacgttctacgcttctgtgcgtttttaatttatgctttcatagaattatgtctgcatcacgggaagaacaaaatggataatgctgttgatcgccacgttttttatatttctgatggtacggcaataactgcggaggtattaggacacgcagtaatgtcacaatttcccgtcactatcagcagcatcacgctgccgtttgtcgaaaatgagagccgtgcacgggcagtgaaggatcagattgacgcaatttatcaccagacaggcgtgcgcccgctggtcttctactccatcgtgttgccggagattcgcgccatcatcttgcaaagtgaaggcttttgccaggatatcgttcaggcgctggttgccccgctacaacaagagatgaaactggatccaacgccgattgctcatcgtacccatggccttaaccctaataatctcaataaatatgatgcgcgcattgcggcgattgattacaccctcgcccacgatgacggcatttcgttgcgcaatctggatcaggctcaggtgatcctgctcggtgtttctcgctgtggtaaaaccccgaccagtctgtatctggcaatgcaatttggtatccgcgcggcaaactacccctttattgccgacgatatggataatctggtgctacccgcgtcgctcaaaccgcttcagcataaattgttcggcctgactatcgacccggaacgtctggcggcgattcgcgaggaacgtcgggagaacagtcgctatgcctcgcttcgtcagtgcaggatggaagtcgcggaagtggaagccttgtaccgtaaaaatcagatcccgtggattaacagtaccaattattcggtagaagagattgccaccaagatcctcgatatcatgggccttagtcgccgaatgtactagagaactagtgcattagcttatttttttgttatcatgctaaccacccggcgaggtgtgacacacctcgcacttgaaatcagcagcgattggtttatcgtgatgcgcatcacttcccggcagtcctgccgtagaagcaacaaatttctgagacttgtaatgaacagaactgacgaactccgtactgcgcgtattgagagcctggtaacgcccgccgaactcgcgctacggtatcccgtaacgcctggcgtcgccacccatgtcaccgactcccgccgcagaattgaaaaaatactcaatggtgaagataagcgactgttggtcattattggcccctgctcgatccacgatctcaccgctgcaatggagtacgccacccgtctgcagtcgctgcgcaaccagtaccagtcacggctggaaatcgtaatgcgcacctattttgaaaaaccacgaactgttgtcggctggaaaggactaatctccgatccagatttaaacggcagctatcgggtaaatcacggtctggagctggcgcgcaaattacttttacaggtaaatgagctgggcgtcccaaccgcgactgagttcctcgatatggtgaccggtcagtttattgctgatttaatcagttggggcgcgattggcgcacgtactaccgaaagtcagatccaccgcgaaatggcttcggcactctcctgtccggtaggttttaaaaatggtaccgatggcaatacgcggattgctgtggatgctatccgcgcagcccgcgccagccatatgttcctctcgccagacaaaaatggtcagatgaccatctatcagaccagcggcaacccgtatggccacattattatgcgtggcggcaaaaaaccgaattatcatgccgatgatatcgccgcagcctgcgatacgctgcacgagtttgatttacctgaacatctggtggtggatttcagccacggtaactgccagaagcagcaccgtcgccagttagaagtttgtgaggatatttgtcagcaaatccgcaatggctctacggcgattgctggaattatggcggaaagtttcctgcgcgaaggaacgcaaaaaatcgtcggcagtcagccgctcacttacggtcaatccattaccgacccgtgtctgggctgggaggataccgaacgcctggtcgaaaaactcgcctctgcggtagatacccgcttctgaatgcgtgcccattcctgacggaatgggcatttctgcgcaacttgttgtcttctcaacaaattactgcttgctctggtcagccataatattgataataagaatcattgttatatcaattattattaatttttatgcgttatacggatagcagaaaactcacgcctgaaacggatgccaatcacaagaccgcttccccgcagcctattcggcgaatttccagccagacactgttaggtccggatggcaaactgattatcgatcatgacgggcaagaatatctgctccgtaaaactcaggctggcaagctgctgttgaccaagtagcctttaactcgagcagctgacttccagccgtttaccccagtcaggtggacgactgacatagtcatcatctctgtcgctgaaaggatttcgcaacgcctcatgcaggcggtgcaattccgtcatatcacccttttctgccgcttcaatcgcccgttgcgccaaccagttgcgcaataccagagcggggttaacgctttgcatcagttgctgacgctcactatcgctaacctcgtcttgttgcaaacgcccccgataacgggcaaaccagtcatcaaatgccgcacgatcaataaactcatcacgtagcggtgacgccgcgctgtgctgctcggtcagactcagcatgcggaatgtgcgggtataatcgctgcgctctcgcgccatcagactgaataattcattcagtagcgcgttatcctctttttgctccgtcatgaagcccagtttctgccgcatccgttgtccataatgcgtcaacaaaacctgctgatagctgtccagggcctcattcagggcatctacggcaacaaatggtgacaatgtctgcgccagacgctgtaaattccacaatgcgacggcaggttgattgtcaaagctgtaacgcccttggtgatccgagtgattacaaataaaaccgggttcgtaatcatcaagaaaaccaaacggcccgtaatcaagcgtcagccccagcagcgacatgttgtcggtattcatcaccccatgagcaaagccgaccgtctgccattgggcaattaacgatgcggtacgtgcgacaacatcggtaaaccagagacggtatttgtcctcatcatctgcaagatgtgaccagtaatgacgaatggcaaagtcagctaactgacgaaccttttccggctcgcggcgatagtaaaaatgttcgaaatgaccaaagcgcagatgacttggtgccacacgcatcagcatcgcgcctggctccaccgtttcccgatacactggcgaatcgctggtgacgatacttaaagcgcgggtcgtcggaatgcccagataatgcatcgcctcactggcgagactttctcgtatcgtcgaacgtaaaaccgcccgtccatcacccattcgcgaataaggcgtcaggccagcacctttcagatgccagtccattgtagtgccatcagcaagccgttgttcgccgagtaaaatgccgcgcccatcacccagttggcccgcccagacgccgaactgatgaccactgtaaacctgcgccagtggtgacataccaggcagtagggtttcgccaccccagacacctgcgccatttttaaacagtgacgatggaatacccagcgtgttagccagttcggcattatgccaaatcagccgggcattatttaaaggcgtaggggaaagtgttgtataggttgctggcaattcatcgcgccaacgggtaataaaagacagggtcatagatcctcctgtttgatagtgtagacggttactctcgtcttaaacaccagcaaacaggagggttatcgctgaaccaacgtcgttatctgatttacaggaacggcaggccacaggcatccctggagagcatggaaatcgaagggggtaatctgtgccaatatttctgccgtatcaatgcctcccgcaatgatgcaattgcaacaaggggaaatttgcgcctggatcgcacgaataaacggttcgaaggagcggtgcgtgatttgttgctgaataaaacttttatccagcatgacgcgggtgaaaagaccatcaaaaaccgctttcattgtgctattgcctgctcccaaattacctaacacaaggggatacacttgcgataaggataaaagaccgcgattatcttttccttcattgagatgcgggtaattctcattaatcaacagttcaataaacggatattttaatagttcgcctgcgtaattatccctctctaataataatgtagccacttgtggcgttaaattaagccaggcaaagagtttatgttgaataaaaaaatgttggcatgattttagtaattccaactgctctgaaaataattgccaatgttgctcctcggtaagttgcgctataacccgactcgtcgggatacgcaccgtgccatcttcactggagaaatgggtaattaactcaacgccgacaaggacttgctggttgtctcttatcggcaggaaatagcaatcagaatgataaagattctccaaaaaaatcttcatggtaaccgtccctctcgaaggatgtttttcagtatccggctaaaagggatgaggccataagacataacaattacagaaggagtaactttcatttgttccatgttaaccactttttcaggggtcctttttttagattatcctgattataaacgaataatccatttacggaatttttgtctgcaaaatactactgtattcaggagtaaatggacggcgatgtatcatcgccgtccatttttcgacatactagattcgtctcgcctgccagaaatttttctgccaatagacattatcaagtgaggaacgcatcactcccttgctggtagaggcgtggataaattggttgttggtatcgtaaatacctacatgcaaaccattttgtccggaccccgttttgaaaaagaccaggtcacctggcagcaactcgtctttatcaatttgcgtgccaatagaggcttgttgtttggtttcacggggcagctgcaaatcgaaacgatcgcgcatcgtcacaaccacaaatcccgaacagtccacaccgcgccgcgtcatgccaccataacgatacggcgtgccatgccagctttgtagctggtcgttcaaaccggcaataacggtaatcgaatcagaaagtctggcatttggcggcggtgctttatggtggctacacccggccagaagcagtgctgtgatcaaaataaggcagaaacgcattccgtacggttcctctgttttttattcttgcattaatttagcgtcgtaattacccgattttcaagatactaatgaaatcagatggtcgaaatcagcattctgtgaccttcgatatccagacggcgaaaattcatcccataggcctgcgccagatttggcggcgtgagcacctcttccctgcgtccactggccagcatttttccaccttttagcaaccacgcccgatgcgcatgacgcaatgtgtggttgagatcgtgactgctcatcacaatcgccagtccttgctgacacagcgcgctcagaattttgtctaacgcactttgttgcgcaacatcaagactgttcatcggctcatcaagaagcagcaattggcttgcgggattggcttgtggtgtgatttgcaacaccaccgcagcaagacgtacgcgttgccattcaccgccggaaagttgattggtgctacgtccgagtttgtcatcaagagccagcgcccctgcgacatcattcagtagttcggtacgcgttttatcgtgctgatgcagtgtcaggtagtgccagaccggcattgcaaacggcggcgtctgctgttgtgaaagataggcgcgatgcagcgcgagttttgttgcggaccatgcttccagtggttgccccgcgaactgaatgcttcccttaccgctggtcattccggccattcgcgccagtaaggtactcttacccgcgccattcggccccaccaggtgcaggatctccccagcccgaacctcgccagaaagcggccccaggcgggtagattccgcaacatcttgtaactgcatcacaatagacattattttgccaacgccagtttaatgctttccatcacaatgggatcttccggcgtcatatccggggaaaaacgctggatgacttttccgtccctgccaaccaggaatttttcaaaattccataaaatatcatccgggtacagcggtgcacggcctttgctgaccatacgggcatagaatccgctctcttccggcgcgactgcggtcggcgctgcggcaatcaatttttgatacagcggatggcgtccttcgccattaacttcaatcttactgaacatcgggaacgtcaccccccatgtggtggtacagtaagttttaatctcttcatcgctgcccggttcttgttccagaaactggttgcacgggaatcccagcaccataaaacctcgatcgacccaggctttctgaatattctccaactgctcatattgcggcgttaagccacactttgaggcgacattgacaatcaacagcacattaccggcgaacttctccagcgtggtcacttcaccgtcgatatctttcactacggtcgtcagaatggaatcttgcatcgtttctcctgggtgtggtcagtaaaaatcttagcttttaatcatagaccgtctttttgcggctaacgtcctgcttttaacaataaccagataaacaccggcgcacctaacgttgcggtgaccacgccaataggcagctctgcggcagctaatgccaggcgcgctacaatatcggccagcagcaatgcgctcgcccctgccagcgcgcagccgggaagtaatacgcgatgatcggttaaaccacacaaccggagaatatgggggatcaccagaccaataaagccgatagcacccgccagcgccacactgacgccaaccatccagccggtcgctgccaccagcacattgcgccagaaccacaggggtaaacccagttgccgcgccgagatctcgccaagtgctaacatattcatcggcctggactgacaacagatccacaacaacacggggatcaatgccagcatcagccagctttgccgccagtctacgccgccaaaaccgcccatcatccagtacatcagctgacgcaaatcaactgaggtggaaaagtagatagcccacgtcattagtgcgctacagataatccctaatgcaacgccagccagcaataaccgactggtcgaaagatgacgacgggcgaaacgtaagagtattaaagtgatgataagcgcgccagcaatcgcacacagccctagcgcccagttggggagttgcccttgcccaagcaataccgcggcgataagccccacgcctgcgccgttagagacgccaagtagtccaggttctgccagaggattttcaaacaacgcctgcattacagcgccggatatagccagcgccgcaccaaccagcaatacagccagcgtacgtggcaggcgaatttgccagacgaacagttcgccacgaggagtaaaccagtcacctggcgagatccattgttcaccggcgcaaaggcttaagagaagcgccagcagcatcaaaactgacaggcataataaccagcgaatattttgtcgctgttgttggcgggcaagtgtcagcatggtatccgttctgctgaagtgtcatggcgttgattttacggtgactcttcgacagtgaaaagaaaaaaggccgcagagcggcctttttagttagatcagattactcgtctttgggcgaagcgttttcgacccggctttttaacttctgcccgggtctgaaggtcaccacgcgccgtgctgtaatgggaatatcctcgcccgttttcgggttacgtcccgggcgttgattcttatcacgcagatcgaagttaccaaaaccagagagtttcacctgttcgccgttttccagagcgcgacggatctcttcgaaaaacagttcaaccagttctttggcatcccgcttgctaagcccaagcttatcaaacagatattctgacatttcagcttttgtaagcgccataggttcaatccctcaatgatgcctggaatcgctcttttaatgcctctacacatttggcgacggtagcggcaatctcctcttcttcgagtgtacggctggtatcttgcaggatcaggcttatggcgaggctcttatacccctccgcaacacccttaccgcggtacacgtcaaataagtttacgccaactacctgatttacgccaactttcttacattcggataaaatatccgctgcgggaacgttttctgcgaccaccaccgcgatgtcacgacggttcgccgggaagcgagaaatctcgcgcgcctgaggcaccacgcggtctgcgagcttgttccactccagttcgaacaccagagtgcgaccgttaagatccagtttacgttccagttcaggatgaacaaccccaacaaaaccaatacgttcacctttcagataaatcgctgcggattgccccggatgcagtgccggattcgcttctgcacggaactcaacctcattcagtttaccggtcaggtcgagaacggattcaagatcgcctttcaaatcatagaaatcaacggtctcttttgccaggttccagtgctcttcgtaacggttaccgcaaatcacaccggctaacatcagatcctgacgaatgcccaacggtgcctgagtatctggtacgaaacgcagaccgctttcgaaaatgcgcacacggttctgctgacggttctggttgtacaccacggttgccagcaggccagtccacagagaaagacgcattgctgacatttcaacagagatcgggcttggcagcagtaaggcttcaacgcctggatggatcatctgctgcactttcggatcaacgaagctgtaggtgatcacttcctgatagcctttgtcgttgagcagcgttttcacgcgcttgagcgacaggtcagcttcacggtgagtacccataatcaggcttgcctgtaccggctcatccgggatgttgttgtagccgtaaacacgcgcgacttcttcaaccagatcttcttcaatctccatatcgaaacgccagctcggcgcaactgcctgccattcgtctttgccttcggtcacttcgcagccgagacgacgcagaatgtcagttacctgctcatccgcaatatgatggccgatcaggcgatccagtttgctacgacgtagagtgatggttgcacgcttcggcagcgttgcttcgttggtgatatcaattaccgggccagcctcaccaccgcagatgtcgatcagcagacgggtcgcacgttccatcgctttgtgctgcagtgccggatcaacgccacgctcataacggtgagacgcatcggtatgcaggccatgacgacgagcacgaccggtgatagacagcgggctaaagaacgcgcattccagcagcacgttttgtgtttcgtcattcacgccagagtgttcgccaccgaagatgccgcccatcgccagcgccttgttgtggtcggcgatgaccagagtgtcagcattcagcttcgcttcagtaccgtcgagcagcaccagcgtttcgccctctttcgccatccgcaccacaatgccgccttcaatgcgatctttatcgaaagcgtgcatcggctggcccagttcgagcagcacatagttggtgacgtcaacaactgcatcgatagaacggatcccgcaacgacgcagtttttctttcatccacagcggagttggcgctttaacgttaatgccttttaccacacggccaagataacgcgggcaggcttccggcgcttcgactgtaatcggcagcgtgtcgtcgatggtcgcaccaaccggaacgatttccggttgaaccagcggcagctggttcagcacggcaacgtcacgcgcaacaccaatgatgcctaagcagtcggcacggtttggcgtcacgctgatttcgatggtgttgtcatcaagtttcaggtattcacggatatcggtgccaatcggcgcatccgcaggcagttcgataatgccgctgtgatcgtcagaaatgcccagttcagagaaggagcacagcatcccttcagacggttcgccacgcagtttcgccgctttaattttgaaatcacccggcagaacagcaccaatggtcgctaccgctacacgcaggccctgacggcagtttggcgcaccgcagacgatgtccagcaggcgatcgccgccgacattcacttttgtcacacgcagtttgtcagcgttcggatgctgcgcacactcaaccacttcaccaacgaccacgccgtggaagctgccggcaaccggttctacaccgtcaacttccaggcccgccatagtgatttgatttgccagcgcatcgctatcaatcgccgggttcacccattcgcgtaaccacagttcactgaatttcataatctattcctgccttatttaaactgtttgaggaaacgcagatcgttttcgaagaatgaacgcaggtcggtgacgccgtaacgcaacatagtcagacgctccatccccatcccgaaggcgaaaccagagtaaacttccgggtcgatgccaacgttacgcaacacgttcggatgcaccatcccgcagcccagcacttccagccatttaccgtttttacccatgacgtccacttctgcagaaggttcggtaaacgggaagtaggaaggacggaagcgaatctgcaaatcttcctcaaagaagttacgcaggaagtcgtgcagcgtgcctttcaggttggtaaagctgatgttggtatcaacaatcagaccttccatctgatggaacatcggcgtgtgagtctggtcgtagtcgttacgataaacacggccaggcgcgatgatacgaatcggtggctgctgggctttcatggtgcggatctgtacgccagaggtctgggtacgcagcaggcgggtagtgtcaaaccagaaagtgtcgtggtcagcgcgcgccgggtggtgaccaggaatgttcagagcatcgaagttatgataatcgtcttcgatttccggcccggttgccacggtaaagccaagctcaccgaagaaactttcgatacggtcgatggtacgggtaaccggatgcagaccgccgttttcaatgcgacgacctggcagagagacatcaatcgtttccgccgccagacgcgcattcagtgcagcgctttccagttccgctttacgcgcattcagcgcctgctgaacctgctctttcgcttcgttgataaccgcaccagctgccggacgctcttctggcggcagctcacgcagggtcgtcatctgaagggttaagtgcccttttttacccaaatattcgacgcgcacattatctaacgcggcaacatctgacgcctggctaatggccgccttcgcactggcaaccagttctgcgagatgtgacatggttttcctcattgtgtcagtggtgacactggttcgttggacttagagcctatcccatcaggctattttacttgccattttggtcccgggctgtgctcgaaattctcacgtacttaaatacgctccggtttctccgcgctggccgtgtccagtctggctgcgacaattacacctgatgagacaggctttttatttttcaaaacgcgcatacaaaaaaagcctccactgggaggctttcaggcgctgttttccgtttctcttctcacgcgctagcctcctggattcaggtgctaaagtaaaaaaagaagcggaaaatagcagcattcattgcttgcgttaccttttggtactcttcaaaagacctttattgaaaaggctacggcgataaaagtcaatgttttgatggcgttgaaacgaaaagagggagactagctccctctttcaactggcttatgccagagctgctttcgctttttcaaccagagcggtgaacgctactttgtcgaatactgcgatatcagccaggatcttacggtcgatttcaacagaggcttttttcaggccattgatgaatttgctgtaagaaataccgttctgacgtgctgctgcgttgatacgcgcaatccacagttgacggaactgacgcttacgttgacgacggtcacggtaagcatactgaccagctttgataacagcctggaaggcaacgcggtatacgcgagaacgcgcaccgtagtagcctttagcttgtttcaaaattttcttgtgacgtgcacgtgcaataacaccacgttttacgcgagccatatgtgctctcctgtatctatattctaattaaaaagttaaaaacgttaacggcttatgcgtacggcaggcacgcgattaccaggcccagatcgcctttggaaaccatggctttcggacgcaggtgacgtttacgtttggtcgcttttttggtcagaatgtgacgcaggttagcgtgcttgtgcttaaaaccacctttaccggtttttttgaagcgcttagcagcaccgcgtacggtcttaatttttggcattttaataacttccacttcgcattgttaataaacgaaacaaaggcgaacaaagcctgtgaagcccgaaggctccacagacagtgctacttgaaggccttactgtttcttcttaggagcgagcaccatgatcatctggcggccttcgatcttcgttgggaaggattcgaccactgccagttcttgcaaatcgtctttcacgcgattaagcacttccataccgatttgctggtgcgccatctcacgaccgcggaaacgcagcgtgattttggctttatcaccctcttcgagaaagcgaatcaggctgcggagttttacctgatagtcgccttcatctgtaccaggacggaatttaatttccttaacctggataactttttgctttttcttctgttccttagaagacttgctcttttcatagaggaatttgccgtaatccattatacgacaaaccggcggctcggcgttagggctgatctcgactaagtctactccggcttcttctgctttctccagagcttctctcagactcacaataccaagctgctcgccttccagacctgttaagcgaacttcctgggcgcgaatttcgccattgatacggttagggcgcgccgtttgaactcgttttccgcctttaataccttattcctccaattgtttaagactgcggctgcgaatctcttgttgcagcttctcgatcacttcatttacgtccatgcttcccaggtctttaccacggcgggtgcgaacggcaactttgcctgattccacctctttatcaccacagaccagcatatatgggacgcgacgcaaagtgtgctcgcggattttaaagccaatcttctcatttctcaagtctgctttaacacgaatgcccgcatttgatagtttttgcgtcaattcgttaacgtattcagactgtgaatcggtaatattcatgataacaacctgaaccggcgcaagccaggtcgggaagaaaccagcgaactcttcggtcaggataccgatgaaacgttccatcgaccccagaattgcgcggtgaatcattaccggtactttacgttcattgtcttcgcctacataagaagcgctcagacgagacggcaaagagaagtccagctgtactgtaccgcactgccatgcacgatcgaggcagtcatacagggtaaattcaattttcggaccgtagaaagcgccttcacccagttgatattcaaacgggatgttgttttcttccagcgcaaccgccaggtccgcctcagcacgatcccacatttcgtcgctgccaatacgtttttcaggacgagtggagagtttgacgacgatcttctcgaagccaaaagtgctgtacatatcatagactaaacggatacatccgttaacttcatcgcgaatttgttcttcagtacagaagatatgcgcgtcatcctgggtaaatccacgcacgcgcatcaggccatgcagcgaacctgacggctcgttacggtggcagctaccaaactcggccatacgcagcggcagatcgcgataagacttcagcccctggttgaaaatttgtacgtgacccgggcagttcatcggcttaatgcagtattcacggttctcagaagatgtggtgaacattgcatctttgtagttgtcccagtgaccggttttttcccacaggacacggtccatcatgaacggacctttaacttcctgatactggtactctttcagtttagaacgaacaaacacttccagttcacggaagatggtccagccgtcgttgtgccagaataccatacccggcgcttcttcctgcatatggtacaggtcgagctgtttaccgattttacggtggtcgcgtttcgcggcttcttccaggcgctgcaggtaagcgttaagtgcttttttgtctgcccacgccgtaccgtaaatacgttgcaacattttgttgttgctgtcgccacgccagtaagcccctgccgttttcattagtttgaaatgatggcagaaacgcatgttcggtacgtgcggaccgcggcacatatcgacatattcttcatggaagtacagacctggcttgtcatcatgggcgatgttttcgtcaagaatggagactttgtagctctccccacggttggcgaaagtttcacgcgcttcgtgccagctgactttcttcttaatgacgtcgtagtttttctcagcaagctcatgcatccgcttctcgagtgcttcgacatcttcctgggttaacgtgcggtcaagatcaacgtcgtaataaaaaccgttgtcaataaccgggccgattgccattttggtatgcggccaaagttgtttaatcgcgtgccctaacaggtgcgcacaggagtgacgaatgatctccagaccttcttcgtctttggcggtaatgatcgacagttgtgcgtcgttttcaatcagatcgcaagcatcaaccagttcgccattaacgcgccctgcgatacaggctttcgccagacctggaccaatgtccagcgcaacatccatggggcttacagcgtgatcgtaatggcgttggctgccatcaggaagagttataacaggcattttatatccttatttgcagtggtgacccacacgaaagatcacatacaaagaaaaatttgtttattaacagttcattgcgaaaccatctagccaacaaatgctaaattggttcgcaatcaggtacacaaatgaaagacattaacctctcaccttccacccggttgagcgatgttaacactaaaaaaagggagattgtacctttccgtttcacattgattcgattcgcaattcgtttgtagtgagtacaccagcaaaacgcttaaagaacaactgataacatcacggtgcgtctgaaaggtttactgcgagcggatttacagcagcataaactgaatccagcaaagttcgttgcgtgatttggcggtagtattttaaacgctcatgagattaatgacgaagtggtcatatcacaatgataaaagtgacacaattcttataacaatttttcgtgcacatttcgttctggcgataataattaatcatcatcctcaaaacctccagatatatataaggcgaacagattatgagtcaaaacgatatcattatcagaactcattataagtctcctcatagattgcacatcgatagcgacataccaacaccttcatcagagcctattaatcaatttgcgcgccagctcatcaccctacttgatacctctgacttaagttcgatgctgtcatactgtgttactcaggaatttaccgcaaactgtcgaaaaatatcacaaaattgttattccactgccctttttaccattaactttgccacttcacccatccatacagaaaatatactcattacattacactataaaaaagaaatcatttccttattactggaaaccacgcctattaaagctaaccatttgcgaagcatactggattatattgaacaggaacagttaactgctgaagatcgtaaccattgtatgaaactgtctaaaaaaatccatagagaaaaaaactatacacccaacagtaaatctcaatggtagtgcatgttttttgcaatctccttctgacgctattttttgtcgccatctgtcattgcaatacgcccttgattcattgagaaatggaaaaggcaaagtcaacctgattaaacattactcctccgttgaatccatacagcagcatgtccccttagtccgggacgcggagttcagagcattacttcgccatcctcctgcagggagtcgcgttatcgcgagtaaggattttggcttcgctttagatattttcttttgtcgaatgatggcaaacaatgtcagtcatatgtccgcgattttatatatagacaatcatactttgtcagtaaggctacgaataaagcagtcagtgtatggacaattaaattatgttgtgtccgtttacgacccgaacgataccaacgttgccgtcagagacacccacaggacagcacggggctttctttcgcttgataagttcatcagttcaggtcccgatgctcagacctgagctgatagatatgttcgcaactgtgcaattgctattctgcccctattacctgtgggagttccaggggctattttcgtgggtattgcatcacgaatgccatttgcccctatacatccatcggcaatgttgttaataatggctacaggccagactcaacagcttattacattattcaaacagttgcccatactccctgaaaaagaaatcattgaaataataactgcgcagaatagcgttggtacacctgctttatttttggctatgatgaacggacatactgacaacgtgaaaatatttatgcaagaaattcagtcactggtagataatcacatcattcatgaagataatctggttaaattactgcaaactaaaagtgctaacgaaacacctggactttatatctccatgttgtatggattcgatgaaataatcgatatctttctgaatgcattaaccactccaatagcacaagagcttttaaacaaaaaactggtgatgagtattttagccatgaaaatacatgatggtgagccaggattatacgccgcaatggaaaataatcaccctttgtgtgtcacacggttcctctctaaaattaatggcatcgcctttaaatacaagttgagcaaagctaacatcatggatttattaaaaggagctacagcacagggaacccctgcattatacatcgccatgagcaagggtaatgaagacgtcgtgttatcttatatatcgacgctgggtgcttttgcaaaaaaacattcttttagtcaacatcagttatttacactattggccgctaaaaatcatgacaacatgtcagctgttcatatagccattcatcataagcattataaaactgtagaaacatattatgctgctattaatgcaatcagccaaagcctgagttttagtgctgatgaaataaagacgtatttataaccagctatttacgatatatatcgatacataattttatttttttcataaaacgcagaaacagtgaccatgtgcacaacgccacccgacggctgtaataacaaaaaatcccttgatgcctgtcccttttgttacactccgttatcacgcacaagagatatgcaggacactggtatgccgactaaacgctttgataaaaaacactggaagatggtggtggtgctactggcaatctgtggcgctatgttgttgctacgttgggcagcaatgatttggggctgagcagtgacaaacgaagacagccagaccgcataacacggtccggcagataattttacatgctgtagcccagcgataaggttgtccgacggtcggtatgttccggtgcagactctggaggttcagagttccatgtgacgttgtaagccaccttcagtccaaaatgttcattaatagcaacatttaatgcgctttcggagttcagcgttgtgtcttccgcgccaaagaccgaaacaccctgcgtaaatttagcgttgtcagtcaactgccatgcataagccccggaggcatagcccagcggctgggtttcactggcattgtcggtatatttgtcgtaacgcacacctggaccgaattcaaagcggaaactgtgtaccgggccattcaaaaactgacgaccataacccgcggtcaacacatcgcgctctcgatagccgttataacggtctgtcagccagcttgcctgaccaaataaatagtcataatcagttaaattaaaacggctacgcccgcccgccgcatatttttctgaagaacgctcatcattagaagaagtattactggcgttcccccacagcgaccaggcagtggtgtgtccataccaggtcatggtggtgtcagccgtaagtgaggagcttttcgtattgcctgattgtgcaagatatcctgcgttcagattaccttcgaaaggttttttagcgctggcaggatcatccatgacagtaaaaacggaatcatcggcagctgcattcagtgacgcaaacatgccccccgccaacataacgatggcaggaactgtcttcaaaagcttcatttatcaagagtccgtacaacaaaaaaagagaccatcgcggtcccggaaactttcttaaggatcaaagattagcgtccctggaaaggtaacgaattataaaaaggcgcgaataacttagcaatgtattcttatttcattttttgaataagcatgtggcgaaaacagatttttatttatatatatttatctgcaaaattttaaataaagctccaataaatcatattgttaatttcttcactttccgctgattcggtgccagactgaaatcagcctataggaggaaatgatggtacgtatctatacgttgacacttgcgccctctctcgatagcgcaacaattaccccgcaaatttatcccgaaggaaaactgcgctgtaccgcaccggtgttcgaacccgggggcggcggcatcaacgtcgcccgcgccattgcccatcttggaggcagtgccacagcgatcttcccggcgggtggcgcgaccggcgaacacctggtttcactgttggcggatgaaaatgtccccgtcgctactgtagaagccaaagactggacccggcagaatttacacgtacatgtggaagcaagcggtgagcagtatcgttttgttatgccaggcgcggcattaaatgaagatgagtttcgccagcttgaagagcaagttctggaaattgaatccggggccatcctggtcataagcggaagcctgccgccaggtgtgaagctggaaaaattaacccaactgatttccgctgcgcaaaaacaagggatccgctgcatcgtcgacagttctggcgaagcgttaagtgcagcactggcaattggtaacatcgagttggttaagcctaaccaaaaagaactcagtgcgctggtgaatcgcgaactcacccagccggacgatgtccgcaaagccgcgcaggaaatcgttaatagcggcaaggccaaacgggttgtcgtttccctgggtccacaaggagcgctgggtgttgatagtgaaaactgtattcaggtggtgccaccaccggtgaaaagccagagtaccgttggcgctggtgacagcatggtcggcgcgatgacactgaaactggcagaaaatgcctctcttgaagagatggttcgttttggcgtagctgcggggagtgcagccacactcaatcagggaacacgtctgtgctcccatgacgatacgcaaaaaatttacgcttacctttcccgctaacaaaaacattcccccagcattgggggaatcatcaccaacctgtcggcaacgcgtttctccgactatgctcaaaagtcatgtgataacaaaggggtgaactatggccagtggcgatcttgtccgttatgtcataaccgtcatgttgcatgaggatacattgactgaaattaacgagttgaataattacctgactcgcgacggttttttgctcactatgacggatgatgagggaaatatccatgagctgggaactaacacttttggacttatcagtacccaaagtgaagaagaaattagagaactggtttcggggcttacccaaagtgcaaccggcaaagatcctgaaatcaccatcacgacctgggaggaatggaatagcaacagaaaataaatggtttttgggcaataatcagtctgtggtgtgcgttagctcgtgtttttacaccgcattcttgcgctaaccttatgatctggcagacaacatgggagagacatcatgtggcaggcaatcagtcgtcttttgagcgagcagttaggtgaaggcgaaatcgaactgcgtaatgaactgcctggcggagaagtccatgccgcatggcatttgcgctatgcaggacatgattttttcgtcaaatgtgatgaaagggaactgcttcccggttttaccgccgaagccgaccaactggagttactgtcgcgtagtaaaaccgtcaccgtgcctaaggtttgggcagttggcgctgaccgtgactacagttttctggtgatggattatctcccacctcgtccgctggatgcgcatagcgcatttattcttggtcagcaaattgcgcgtttacatcaatggagcgaccaaccacaatttggccttgatttcgataacgcgctctccacaactccacagcccaacacctggcaacgtcgctggtcaacgttttttgctgaacaacggattggctggcagttggaactggctgcagaaaaagggatcgctttcggcaatatcgacgccatcgtcgagcatattcagcagcgtctggcctcacatcaaccgcagccttctctgttgcacggcgatttatggtccggcaactgtgcactgggtccggatggcccgtacattttcgacccggcctgctactggggtgaccgagagtgcgacctggcgatgttaccgctgcatactgaacagccgccacaaatctatgacggctatcagtcagtatccccgctacctgccgatttccttgaacgtcaaccggtttaccaactctacacgctgttaaatcgtgcaaggttatttggcggtcagcatttggttattgctcagcagtcattggatagattattagcagcatgatatgggttgaggataatggccgctccgtgcggccttttgattaaataaacccaagcagagaaaagaacacataacctgcagcaatacaaataaccggcaggatatacagtgagaaaaactgcaggaaaatagtatggtgcggaacaacaatacgggactcaatttgttcacgcgttagcccctcttcccctttggctttttccagaatgagttgatcttcaacaccttcccgcaagaagcgcgcctggcgactcatccgggcaccggaatcctgcaacgccagtccgacaaaaatcaggatgaaaatcacccagaacataacgttcacgccaccattaaaattgggcgtcggggagttataccagaatagattcaaaaaaggcgtattcgcctgcatcatatcgatcatgacatgagtaaagtcgagcatgaccgcattaatgccttccttgttttcctgccgggtattcataaatttcagcaaagaaatcaatgtagagatcaatgcaggtataaaaatcacccaacccaaaatccttttcaaaacagcaatgcgtccagcttgttgatacgtcatgagttctccttgattaagacgcgtcgtttcacttagtttacctgtagatatctgttttcgcccattctttaaaggcgatatgataggcgcttaatcataagcacggcttaataccttacacataatgctctaaaggagaggttgtaatgtcaaccccgcgtcagattcttgctgcaatttttgatatggatggattacttatcgactcagaacctttatgggatcgagccgaactggatgtgatggcaagcctgggggtggatatctcccgtcgtaacgagctgccggacaccttaggtttacgcatcgatatggtggtcgatctttggtacgcccggcaaccgtggaatgggccaagccgtcaggaagtagtagaacgggttattgcccgtgccatttcactggttgaagagacacgtccattattaccaggcgtgcgcgaagccgttgcgttatgcaaagaacaaggtttattggtgggactggcctccgcgtcaccactacatatgctggaaaaagtgttgaccatgtttgacttacgcgacagtttcgatgccctcgcctcggccgaaaaactgccttacagcaagccgcatccgcaagtatatctcgactgcgcagcaaaactgggcgttgaccctctgacctgcgtagcgctggaagattcggtaaatggcatgatcgcctctaaagcagcccgcatgcgttccatcgtcgttcctgcgccagaagcgcaaaatgatccacgttttgtattagcagacgtcaaactctcatcgctgacagaactcaccgcaaaagaccttctcggttaatgaccaggggcagtgatctcgctgcccctggttctttatctgaaattgcattcaactgacggattaatcgtcaatttaagagaaagagttacaccgtcaccacttccgtgcactgtataaaaatcctatactgtacgtatcgacagtttagtgagttttatcatgacggcggaaggtcaccttctcttttctattgcttgtgcggtatttgccaaaaatgccgagctgacgcccgtgctggcacagggtgactggtggcatattgtcccttccgcaatcctgacgtgtttgttaccggacatcgatcacccaaagtcgtttcttgggcagcgattaaaatggatatcaaaaccgatcgcccgcgcttttgggcatcgtggttttacccacagtctgctggcggtatttgcgctgctggcaaccttttaccttaaggttccggaaggctggttcattccggctgatgcgctacaaggaatggtgctgggttatttgagccacatacttgccgatatgctgacacccgccggtgttcccctgctctggccatgccgctggcgtttccgcttgcctatcctggttccccaaaagggcaaccaactggaacgttttatctgcatggcattatttgtctggtcggtatggatgccccattcattacccgagaacagcgctgttcgttggtcatcgcaaatgatcaataccttgcagatccagtttcatcggcttattaagcatcaggttgaatactaaaaaggcaaaaaatcacctttctggaataagcaattccatttgaatataagagccagctcacagttctgttaatcttgcgccaacactatgactgctacgcagtgatagaaataataagatcaggagaacggggatgaactttccattaattgcgaacatcgtggtgttcgttgtactgctgtttgcgctggctcagacccgccataaacagtggagtctggcgaaaaaagtgctggtgggtctggtgatgggtgtggtttttggccttgccctgcataccatttatggttctgacagccaggtacttaaagattctgtacagtggtttaacatcgttggtaacggctatgttcaactgctgcaaatgatcgttatgccgttagtcttcgcctctattctgagcgcggttgcccgtctgcataacgcatctcagttaggcaaaatcagttttctgaccatcggtacgcttttgtttaccacgctgattgcggcgctggtcggtgtgctggtcaccaacctgtttggtttgacggctgaaggtctggttcagggtggtgcagaaactgcacgtctgaacgccattgaaagtaactatgttggtaaagtctctgatctgagcgttccgcagctggtcttgtcctttatcccgaaaaacccgtttgccgatcttaccggagccaatccgacgtcaattatcagcgtggtaatttttgccgcattcctcggcgtagctgcattgaaactgctgaaggatgatgcgccgaaaggtgaacgcgtcttagccgctatcgataccctacaaagctgggtgatgaaactggttcgcctggtcatgcagttgaccccttacggcgttctggctctaatgaccaaagtggttgcaggttctaacttgcaagacatcatcaaactgggaagtttcgttgtcgcgtcctacctcggtctgctgattatgtttgcagtgcatggcattctgctgggcattaatggcgtgagtccgctgaagtacttccgtaaggtatggcctgtgctgacgtttgcctttaccagccgttccagtgctgcgtctatcccactgaatgtggaagcacaaacgcgtcgtctgggcgttcctgaatccatcgccagtttcgccgcctctttcggtgcaaccattggtcagaacggctgcgccggtttgtatccggcaatgctggcggtgatggttgcgcctacggttggcattaacccgctggacccgatgtggattgcgacgctggtcggtattgttaccgttagttccgcaggcgttgccggtgtcggtggtggtgcaactttcgccgcactgattgtactgcctgcgatgggcctgccagtaaccctggtggcgctgttaatctccgttgaaccgcttatcgacatgggccgtacggcgttaaacgttagtggctcgatgacagctggcacgctgaccagccagtggctgaagcaaaccgataaagccattctggatagcgaagacgacgccgaactggcacaccattaattcttatgctggcaacggtccgttttgtataggggccgttgccttactttttaaatgttccatcgcggcgatgcatactgactcatatttaaacagatcgtcagcgaaaaaaatgtccaacttatcaatacattcctggctcaatgaatgtgcctgtagcgagaagcttaaaacctcatacccgagacgttttctaagtgaactatctggaatactcataatatcttcaagcacaccacttcccattcccggaagatttagtggattaaaaagaagattgatattaagcattgatattatcgaaggaaactttaggagactctcatttttttgaatcgcagcaaaaatgctcccgacaggatgtatataattttgttcatagtatatagtccttaaatagtgaataaccaacctgttttttatactgatcaaattggtcattttttctgggcgaaatacagaagtgacatccattccaataaaatctttatttatacctcttatccgaatttcactaccataaagattattaattattactctatatttaacattgtcctgcagatatgtatcaaaactaagtgctggcgctcctggctttgaggcatcatagttaatgttagacatataggcaatcatataattaaagtttgattctgctatttcatcgcagtcacattgacccgttgatataaagaaagtgagtgctgtcatagtagactgcagcctttctttaaaagagtcgaaagccaggcttttaatatttaaatcaccataattactctgtattaagtttgtagaaaacatctcccgcctcatattgttaacaaaattattatctcatttaaatctaagtcatttacaatataagtttaagagcgacgccacaggatgaactatcaaaaatagctcatcatgattagcaaaacttaaccattttaaaataaataaacaattaaagaaaaaagatcacttatttatagcaatagatcgtcaaaggcagctttttgttacaggtggtttgaatgaatgtagcaacgaaatacagaatttcaggtcatgtaactcccggcaaaaccgggaggtatgtaatccttactcagtcacttccccttcctggcggatctgatttgcccaacgttgggcagattcaggcacagtaaacgccggtgagcgcagaaatgactctcccatcagtacaaacgcaacatatttgccacgcagcatccagacatcacgaaacgaatccatctttatcgcatgttctggcggcgcgggttccgtgcgtgggacatagctaataatctggcggttttgctggcggagcggtttcttcattactggcttcactaaacgcatattaaaaatcagaaaaactgtagtttagccgatttagcccctgtacgtcccgctttgcgtgtatttcataacaccgtttccagaatagtctccgaagcgggatctggctggtggtctatagttagagagttttttgaccaaaacagcggccctttcagtaataaattaaggagacgagttcaatgtcgcaacataacgaaaagaacccacatcagcaccagtcaccactacacgattccagcgaagcgaaaccggggatggactcactggcacctgaggacggctctcatcgtccagcggctgaaccaacaccgccaggtgcacaacctaccgccccagggagcctgaaagcccctgatacgcgtaacgaaaaacttaattctctggaagacgtacgcaaaggcagtgaaaattatgcgctgaccactaatcagggcgtgcgcatcgccgacgatcaaaactcactgcgtgccggtagccgtggtccaacgctgctggaagattttattctgcgcgagaaaatcacccactttgaccatgagcgcattccggaacgtattgttcatgcacgcggatcagccgctcacggttatttccagccatataaaagcttaagcgatattaccaaagcggatttcctctcagatccgaacaaaatcaccccagtatttgtacgtttctctaccgttcagggtggtgctggctctgctgataccgtgcgtgatatccgtggctttgccaccaagttctataccgaagagggtatttttgacctcgttggcaataacacgccaatcttctttatccaggatgcgcataaattccccgattttgttcatgcggtaaaaccagaaccgcactgggcaattccacaagggcaaagtgcccacgatactttctgggattatgtttctctgcaacctgaaactctgcacaacgtgatgtgggcgatgtcggatcgcggcatcccccgcagttaccgcaccatggaaggcttcggtattcacaccttccgcctgattaatgccgaagggaaggcaacgtttgtacgtttccactggaaaccactggcaggtaaagcctcactcgtttgggatgaagcacaaaaactcaccggacgtgacccggacttccaccgccgcgagttgtgggaagccattgaagcaggcgattttccggaatacgaactgggcttccagttgattcctgaagaagatgaattcaagttcgacttcgatcttctcgatccaaccaaacttatcccggaagaactggtgcccgttcagcgtgtcggcaaaatggtgctcaatcgcaacccggataacttctttgctgaaaacgaacaggcggctttccatcctgggcatatcgtgccgggactggacttcaccaacgatccgctgttgcagggacgtttgttctcctataccgatacacaaatcagtcgtcttggtgggccgaatttccatgagattccgattaaccgtccgacctgcccttaccataatttccagcgtgacggcatgcatcgcatggggatcgacactaacccggcgaattacgaaccgaactcgattaacgataactggccgcgcgaaacaccgccggggccgaaacgcggcggttttgaatcataccaggagcgcgtggaaggcaataaagttcgcgagcgcagcccatcgtttggcgaatattattcccatccgcgtctgttctggctaagtcagacgccatttgagcagcgccatattgtcgatggtttcagttttgagttaagcaaagtcgttcgtccgtatattcgtgagcgcgttgttgaccagctggcgcatattgatctcactctggcccaggcggtggcgaaaaatctcggtatcgaactgactgacgaccagctgaatatcaccccacctccggacgtcaacggtctgaaaaaggatccatccttaagtttgtacgccattcctgacggtgatgtgaaaggtcgcgtggtagcgattttacttaatgatgaagtgagatcggcagaccttctggccattctcaaggcgctgaaggccaaaggcgttcatgccaaactgctctactcccgaatgggtgaagtgactgcggatgacggtacggtgttgcctatagccgctacctttgccggtgcaccttcgctgacggtcgatgcggtcattgtcccttgcggcaatatcgcggatatcgctgacaacggcgatgccaactactacctgatggaagcctacaaacaccttaaaccgattgcgctggcgggtgacgcgcgcaagtttaaagcaacaatcaaggtcgctgaccagggtgaagaagggattgtggaagctgacagcgctgacggtagttttatggatgaactgctaacgctgatggcagcacaccgcgtgtggtcacgcattcctaagattgacaaaattcctgcctgatgggaggcggcgcaattgcgccgcctcaaatgatttacatagtgcgctttgtttatgccggatgcggcgtgaacgccttatccggcctacaaaactgtgcaaattcaatatattgcaggaaacacgtaggcctgataagcgaagcgcatcaggcagttttgcgtttgtcagcagtctcaagcggcgcagttacgccgcctttgtaggaattaatcgccggatgcaaggttcacgccgcatctggcaaacatcctcacttacacatcccgataactccccaaccgataaccacgctgagcgatagcacctttcaacgacgctgatgtcaacacatccagctccgttaagcgtgggaaacagtaagcactctgacggatagtattatcgataaacgccggatgacacatcacctccagcgaacgatcaccccgatggcctgcgtcatccagcacttgcaggaacagcgactcactgatctcttcaccgtagaatgcactgctgaatccctgggtagtgcgcaggttgaccggcaaatcaaacgccatctgacgatccgcccgcaacgcaatgccctgctctgccgcaaacctggcaacaatcgggaaaatctgcgggaacatatgcacatgatgatggctatcaagatgcgtaggtttgcgtccaaatagctcaatgaaacgcaaatactgactgacaagctcctgagtaatttcttccagcggtaaagcatcttcttctgccaactgccagatccattttcccagcacaccatcgcgggttaaccccggcatagctgtcagtggcttacccatagtaaggacaaagtgcatccctatggccagactcggttcatcacgactcaactgcaccgcatggtcaatagcctgcccattcaccagcgccgtcgtcgacgtgacaatcccattgcgacaggcctcgataatgccgtagttctgacctttgcttaagccaaaatcatcggcattaacaatcagtaagcgttccataatcagcctcggttaatgtgcttttttaagctctgcgatgcagtcggcaaagtttggcagccatttctcgtgcgccagaatcatctcgcgtgccagcagctcagcatcgcgatcggaatgcaccaacggactaaggtttagcgccagtaacacatcgttaaattctccgctaagtgcggcgttactggcagcaatctcgaagcctttaatggtgtgaatcagccccattactttatcatcgaaatgcgtaatgcgcggatgtggcgtcgcgccatcgcgccccagcttacaggtcatttctactgcccagtctgccggaatattatcaatctgcccatgatgcgggatattaacgtaatgttctgcttgcttgtcgttgtagatagcgttgatcacttcgcatgctgcatcagagtaataagccccaccgcgctgttccagttctttcggcttaactttcagctcaggatttttatacagctcaaaaagttgtttctcgactttctgtactacctgcgctcgtgcgccgcctttgtagtattcgcccatttcaatagccagcatctctttctgcttgaagtaatacagcagataagaacatggcagcagattcaacgaacgaattaagccctcactaaatggcagatcgaaaatattttttacagaggacgcttttaactgccctgacgccacaccatcaagcaattcggcaaagcgcgacttgccatttaccagcacatccttaatgaacaccatatggttgaggccgaacaaatcgatagataaatcatcgctgtctttcagcatcagaacatcgcgaataaacatcttcatgccgatcggaatattacacacgccgataaagcgtttaaatccggtatgacgataaacggcttcagtgaccattcccgccgggttagtgaagttaatcacccatgcattcggacaaagctcttcgacatcttttacgatgtcaaaaatcaccggaatggtacgcagacctttaaacaaaccgcccgcgccgttggtttcctgaccaagataaccatgacttaatggaatacgttcatccagttcacgcgccggtaattggccaacgcgcagttgggtagtaacgaaatcagcatctttcaatgcttcgcggcgatccagcgttttataaagcttcatcgggacgccagcgttatcaatcatccgttggcagagatcgaaaataatatccagtttcgctttaccaccttcgacatccaccagccataattcgctgaccggcaattcgtgataacgcttaataaatccttccagtaactccggggtatagctgctcccgccaccaatagtgacgacttttaatttctggctcataatttctcccttcagtacagaatactgatatctggcatatctgcccccccggacataaataatccagcaacaggacagatatgtgaattgtcaggtataacgacttactgattaaattcagtcaatttcttacgatagctcttaggcgtaaaggacgttaatttcttaaacgttttaataaacaaactcgggctactataaccggcctcaaacgcaatatccgtcactgaatagttggtcatttccagttgttttttggcaaaattaatacggatttcattaataatctgcattggcgttttgccataatatcgttgagtcgctcgcgtcaaatattcctgtgatttggctgacaacgccaccatattctccagcgccgattcactaaactgctctttatcatgcatcttttctaccgtacttttcagccactgcggtacatcatcaatcacctgttcttcgcggtaatgacgtaaacggttaatgacataaaaagtaaccatctcaacaaactcttccagccctgtttcgcggaaattcaatgaagaaatcactgtttccacataggtgagaaaagcgttattggtccggtatacctgcgaagcgacaaagcaataaggcaacaatggcaggtaatgctgctcaaaaaagcgtttactgatcccaacgttcaatatgcgcgtggcaccaaactcataaaaactttgatggtgcgaacctaacggaataaaaacaaaatcgccccgttccagtaacacgcgcttaccgttaatctcctggaaataacgcccggttaataccagagtaaattcataatagtcgtgctgatgcagtccgctgatactctcagttttgttatagataaacacatggaagtttttgccattaaacaactgctgttctcgggcagtggcaatttccggcgcgttaatcactggctgcatcatcgactccttatgccttcagtttttcatgaagctcaattaattcagtaatcagttcacgcgcaagcatggacgtcattaaatgatcctgagcgtggaccagcaccagactcactttcatcttaccttcgcccgcatcgccttcaatcagtttcgtctgtaccagatgcgcttcattcaatgccatccgtgactgatccatcatggcttttgctgcggcaaaatcgccctgcttcgcctgtttcagtgccgcatacgccaggctgcgcgcttgtccggagttgatgatcagccccatcaccacttcttccagctcttcagcttccgtttgcgtatcgggaatgttatcgagatccatcatacatcgttcctctcttttcttaccggcacgattacccgtaccggcatcgattaaaatttcagggcgttagcgatatcttcttcgctctcttctttatcaatcgcattttgtgctttgttagccaccacaacaaagggcagataaattaacgttgcgatgccaaggttgaagagtgcgaccagcaatgcggcgacgctaccgttggtgttaaagaaggctcccagaccggttggcatggtccacggtgcaatattggtcaccggaggaataatgcccatgtagtacgctgcgagggtgattgccgccagaatcggttgtaccagtacaaacgggataaacatcaccgggttcatgataattggcagaccaaacagaatcggttcgttaatctggaagatgccggacggcagcgccagttttgccacctgacgataatcagcacggcgagaggcgataaagatagccaggatcaggcctaaagtcgcaccactgcccccaaggaaaataaaggagtccagcatcggcttggcccagatatggaaggtcttaccggctgccagcgccgcttcgacggaaccatattgctgataggtcgcgatattttccagtgcccacggcgtcataatgccgttgtccagtgcggtcagcgccagcgcgccatgaataccgaagaaccagagcagtggaacaaagatcacataggcccagcccaccacgctacccaacgatgccagtggggttgagatggtatccataatgatctgatggaagttggtgccccaggtattcaacgcccaggcaataatccccatcacggaaagaataataaagccgggaattaatgccgagaaggaacgcgatactgaagcaggtacgctgtcgggcagtttaatgacccaattgcggcggacaataaaggtaaacatttctgccaccaccaggccaataataatcccggagatgatattcgccccacctaaccagtttgcaccaaccgcataggcctcaccgacactatatggggtgacggtcataaatgctgcaacggataacaacccagccgccagcgcatcgactttacgctcttctgccagcgccatgccaataaagaacggtgccattaaagacattattcctaatgttccgttatatacgttgccgccaatacctttcagaccattaagtgtttcaatggttgaggcgtcgaggcgaatacctaaggaataaaaaaacgacccctccccaaagcttagaaaaacgttgttaattaatacaaacatggcccccgcaagggttaacggcattaagcgaataaagccatttttgattgcattaacgtgtggctgctttcctattttaactgcaaaagggaggagtaccttttcaagcgatgcaataacattactcatagaaaaatacccttaaaaaccgcaatttaaatattgcggtattgatttatgaaataactctttgacgggaaaatttaaaataaattaatttgctgcggcttttttaatcgctgcaaccgcagccttaagcacgcctaaaccatcgactttgccataaagcagcgagtcaattacttcaaccggtttgttgggtaacaaacgctggatttcgggcaacatataagcaatctgcggccctaataacacgacatcggcattctgacctttttcaccagccagtgtttccggaaatgcttcaataatgaccggaacttcatatttttctgcctgtgcgcgcatttttgataccagtaaagaggtagacatgcccgcagaacaaaacagataaatgtgtttcttttccataaaactgccctcatcgacgattatctgtcagccagacactccgcaagccttaacctgcttccatgctctgggtaacttgcgaaaccaacatgactttttttgtggctgaaaggagtatacggtatagacctgagcaatagtatttctttgaccttataaattgtttctccttgacctgtggttatgaccctcttcacatttcgggcaaataattcgcgaagataattaagaactcaggccaaaaaaaaccggcgcaatggccggtttccgttgttactcaagctttcagacgaattgattacttcgcagcctgtggatcagtgtcgtattcagcacaggtctgataaccggagttgatgacatgtccggtatcatctaacgcgacaaagtaggtttctgctttaccatcacgttgacccaggatgtaggtctggcaagtaccgcgagcatggatcatgctcacttcagacgaaggtttacccgcaatttgtgcaacctgcgcccggctcatgccttttttgacgtctttcaccacaggctgtacaaactggtctttggtacgatcataagccgtacaacccgccagcatggttaataccgccgctgcactcagaattcctgccatattcttgttcatattccgtcctcttgtttatcagcgtgttagataagcctggaatacattgggcgctttttcaagcccgtgaacgaaacggctccgctttcagaggattcctgtatgacgttttaaccaccattcagcccgctgtcgcttgtcgtttcagtagcaacgggttagctttaaggaagttttgtcttttctgtctggaggggttcaatgacattgcaacaacaaataataaaggcgctgggcgcaaaaccgcagattaatgctgaagaggaaattcgtcgtagtgtcgattttctgaaaagctacctgcaaacttatccgttcattaaatcactggtgctcgggatcagcggcggtcaggactccacgcttgccggaaagctgtgccagatggcgattaatgagctgcgcctggaaaccggcaacgaatcactgcaatttattgccgtacgcctgccctatggtgttcaggccgacgaacaagattgccaggatgccattgcctttattcaaccggatcgcgtattaaccgttaatatcaagggcgcggtattggccagcgaacaggcattgcgggaagcaggcattgaactgagcgattttgtccgtggcaatgaaaaagcgcgtgagcggatgaaagcacaatatagcattgcgggtatgaccagcggtgtcgtggtgggcaccgatcatgcagcagaagccattaccggattcttcactaaatatggtgacggcggtacggacattaatccgctgtatcgtctcaacaaacgtcagggtaaacagttactggcggcattagcttgcccggaacacctttataagaaagcgccaacggccgatctggaagatgatcgcccttctctgccagatgaagtggcactcggcgtgacctatgacaatatcgacgactatctggaagggaaaaacgtacctcaacaggtcgccagaacaatagagaactggtatctgaaaaccgaacataaacgccgtccgccaattaccgttttcgatgatttctggaaaaagtaataatttgcacatattggattgtgcgaaaaagagtaatttgttcacgccggatgcggcgtgaacgccttattcgacctataaaactatgcaaattcaatacattgcaggagtcgaataggcctgacaggcgtagcacgtcagacggtgtaacctttgtcatcgacccgcctcttttttaatcgcttcccgcctgttacactggatagataaccagcattcggagtcaacagtggtacggcgtttaacttctccgcggctcgaatttgaagctgcggcaatttatgaatatcccgaacatttacgttcattccttaatgacttacccacccgaccaggggtgtatctgtttcatggtgaaagtgacaccatgccgctctatatcggcaaaagcgttaacatccgcagccgcgtcctttctcatttacgtaccccggatgaagccgccatgctacggcaatcccgacggatcagctggatatgtaccgccggtgaaatcggcgctctgctccttgaagcgcgattaatcaaagaacaacagccgctgtttaataaacggttgcgccgcaatcgccagctctgtgccctgcaattaaatgaaaagcgcgtcgatgtggtgtatgccaaagaggtggatttttcacgagcccccaacctgtttggcctgtttgccaataggcgcgcagctttgcaagcattgcagaccatcgctgatgaacaaaaactttgttatggcctgctgggactggaaccgttaagtcgcggtcgtgcatgttttcgttcagcgctaaaacgttgcgccggagcatgctgcggtaaagagagccatgaggaacatgcgctacgcttgcgccagtctctggagcgtttgcgggtggtgtgttggccttggcaaggggcggtggcgctgaaagaacagcacccggaaatgactcaatatcatattattcaaaactggctgtggctgggggcggttaattcgctggaagaagcgacaacgttaattcggacacccgccgggtttgatcacgacggttataaaattctttgtaagccgctgctttccggtaactatgaaattactgaacttgatccggcgaatgaccagcgagccagttgatttcactgaacaacagtttaccttgcggttgtaaaagccgcagggtgtgcctgccatcgaaccagcacgcgccctggtcggtagtgagcaatttatcgcccagttgccacgccccgttaatcacaaacaccaccccgccgcgtgagccaaaggtagtaaacgtacgttcggcaattctgactttcgccttacagacatccaggcgtgtcatgatgttgaaatccatcgacatctgccctgccgtcagtttcgcttttaccacctggtccgctgcaaaggcaaaaggctggaacggttttaaggtatggttaaagcggtctgcgctttcaaggagcatctcgccgccttccagcaacgtcactatcctttccatgccgggaaacaaagaaaactccccattcgccgcgatggatgcaatgctggcacgccagtaaaaatcacgttttgccggtgggaacgtgcaaatttcgcgcgtttcaccggcagcatttcgccacagattcaccgacattttacgcatatcaaagtattccatactcgctcccggcccgttcttttcattgttatcgttcaggtaaccgtggatggttatcggcaactcgggtgatttacgttagtggtgatcaggctttttttacaactgtttgagaagagaaaagaaaaccgccgatcctgtccaccgcattactgcaaggtagtggacaagaccggcggtcttaagttttttggctgaaagattattcagcagttgcaggcattttaccttttgccgctggacgttctgtcagacgcttctcaaaattagcattaaattgctttttctgttccggcgtcaggatgttgtaaattttgttctgggtttccatgtgcgccagcatgttagctttgcgctgttcttccatttttgcgatctgcgcttcagcttttactttatcgaaggtatcgctggcaatgatgtcatgcattgcgcggcgttcttccagcggcggacgtttcatctggtcacgctggcctttcatgatttcgcggatctgctgtttctgcgcgtcggtcaggttcaggtctttgaacatcatgtcctgatgcggaccgaacttgcctttgtggtgcatcatcggcttcgcgtcagccggtgctgcggtagtggtgtctgcggcatgggccaggttagccgcgccaagagccagggtagaggcaacaaacagtgcagttaatttacgcatattctatatccttcctttcagttatttattacggctttcttaagtagcgtgccgtgttgacgagattaactttactgactttagcgtcaattaatcagagcaacggtaaaacaatgaaagtgtaaaaaacacttttgcgccaattatggagaaaaaaagaaaatttgatggagagtgatgagagaatattacaacacgatgattttgcagagattatgaagaactataccggatgactggtgataaataaagcaaataaccaggattaatctgtattaatttataagaaagcaacttaatacccgcagaatgatttctgcgggtaagtattagcttattttttcgagcattaatcccgcgcgtaatcccaacgctaccaacggattagggaataacacatactctacatcatgggttacggtaaaacgttcctctccgtcctgcgccagcaatgttcctttctcaaacggcataaaattcagcgtgtcacttgccatatgcatttcgaaggacggcgagtggcgagtaatttgcgaaaccacccgataacggagcggcggtgttctcacgataccgacactctcaccagatagcagcgcagcaattgcgctggcagttactgcaaactggcgaagatcgttttgcccaaagggcaacgctttgccaagttccagcgtacaggccagcgcgccaaaatgtctggcgctgaaatgggtaaacgtaccaccaggttcctgatggaacaccagcgcctccagccccgccgcacccagccacgtcagaaatttctcgtcccagggaatgtcgcgttgcggtaatacaccgaactgcggatgcaaggagccacgaattgcggtatgtagatcaaggtgccagcgcacagattctttgccctggtcataaaaatcttccaggcactgttccagttcgcgcgcccgacaggtttctccgctttcagcaaatagctgccaacgaccgccaaacattcgattcatatcgctatggcaataacgtttcccttgcttcagcgcaggaggattcccgaggatcaccagcaaccgccaacgtaacgggatctcgccgtgagatatcgcgccaagcaacgcgtccagcatctccacaggtgccgtctcattaccgtgtattcccgctgaaatcaccagtgcgccttgcggtggcgttaatggcgtcagttccagcacaccatcgcccagccagcgccagcgaacgccgttgatttctcgctcggtgataaccggttttttacccgttaaggtcagagcaagaaaattatccattgctccctccctcgcgctggaacggataaaccgaaccgagattcagtaattggctcaatacatccagtgcttcccgcccttcgcgcagcaattgcgggtcggccagatcggcagcagtaaggcgatcgcggtagtaacgatccacccagtcattgagcgcattaaacagcgtatcgttcatcatcaccgccggattcaccgcccggcgttcttcttctgtcaataccacccgcaaccgcaggcacgccgggccgccgccattcgccatgctttcacgtaaatcaaagacttttagttcgctaatcgggttgtcagcggcaaggagttcattgagataaccccatactccggcgtgttcccgacactcctgaggcagcaccaacatcatggaaccatcatcgcggctcagcagttggctgttaaacagataggtagacaccgtatcagacacggaaacctgagttgccggaacttctatcgccataaaaccattgacccgcgcacgcaggtttgccagtaacggtgactggcgagcgaacgcctgttggtggcaaaacagcacctggcggttactcacggcaatcacgtcattatgaaaaacgccctggtcgataacgtccgggttttgctgggcgaaaatcacctgttggggattcacctgattcagccttgccaccgcctcgctggcttcgcgagtctgtcgcgccggataacgggaaggccgggtatcattgccttcttctcgcccgtagacaaaaagttgcatacccggttcaccgtaatgaccgccgagacgattgtggtttgccgccccctcatcaccgagcaacgctacctgtggcaacgccgaatggacgctaaatttctcttcgtcgttaaaaatcgcttttaacagcgattcagtgacgggcgcttccagcgaacggtgaaatttattgttcaggttggcaacggtgagatgcactttgccatccagcgtatcggcagatggcgcgatcgttgccgcattggctacccacattggcgaagcggaactgacgctggaaagccagtgcggtgcctggcgtgcaactttttccagtacctgctcatcgctaccactgaatcccaactgacgcagcaccggaataaacggacgctcgtgcggcgggatcacggcctgggggaatcccgcatcggcaagggctttcattttcagtaagccctgttttgccgcctgtcgcgggttagacacctgaaaacggtgacgggtagaggcttcattaccaaacgacaggccagcgtaatgatgcgtcagccctaccagcccgtcgaaattaacttcccaggcgttcatcgcaccacctcatcggaaaaatccagcccggggttaagcgttgcgggcaaagttaacgagtccgactccaggctcgccataggccatgcgcagtaatctgcggcataccaagcgctggggcgatggttaccggatgcaccaatgccgccgaatggcgcggtactggcagcaccagtaagcggtttgttccagttaacaatccccgcccgcgcctccagcaacagttgatcgaatttttcccgctcgggggaaaccagaccgcaagagagtccgaagcgagtgttattcgccattcgaatcgcttcctcgaaagaatcataacgccagacgcgcaaaagcggcccgaacacctcttcatctggtacgccagcaacgcctgtcatttcaatgatccccggcgtcagcaacgatgtctctgattgtaataagcgcggcgcaagcagggttcgtccgcccatcgcttccagttgctgccaggcagtaaccacctgctgtgcggcctgttcagaaatcagcccgccaataaacggctgcggttcgtcatcccagttgcccggcgttaatcgctggctgacggcaaccagacgagcaagaaacgcatcgccctgcgctccgcttttgagcaataaacggcgggcgcaggtgcagcgttgcccggctgtgacaaacgccgactgaatggtcagatggacagccgcgtcgatatccgccacctcatcgataattagcggattattaccgcccatctcaagggcgagaattttctccggctgaccggagagctggcgatgcagctggtagccggtattggcgctaccggtaaacagcaaaccgtcgagatcctccagcgcactcagcgcctgacccgtttcacgcccgccctgcaccaggttcagtacgcccggcggcaagccagcctgctgccataaacgcattaccgcttcgccactccacggtgtcagttcgctgggtttaaagataatggtgttacctgccagcaatgccggaacgatatgtccgttcggcaaatgaccagggaaattatacggcccaaacaccgccagcacgccgtgcgggcgatgtcgcaggctcgccgcaccgtccggcatttcactacgctgctcgccggtacgaacgtgatacgccttaattgatatcgcgattttattgatcatcgccgtcacttcggttgccgcttcccagcgcggcttacccgtttctctggcaataatcgcggttaattcggctttattgctttccagcaatccggcaaagcgttcgacaacgacctgacgttcagccaatgagagccgcgcccagcgcggaaacgccgcacgggctgcccgacaagcctgttcgacctgagcggcaccggcatcattgccttgccataacacctcgcccgataccggattacgcttcacacgcgatgcgccctggcccgttatccagtcaccgttaatccataaagtcatgctgttttctcctctgcgcacaggcgcaccagacgaacgcgatcccctgcgtggcatttgagggcatccagttgtgcggcggttaaaatcaaacgctcggttgccggatcggtacgcaccagcaccacgcggaaatggtgataattttcattggcgaccaggcaggccggaaaatcgccctgcgcaggctgcccttctgccacttccaccagccgacttttacggatggcgcgcacgcggtcgatgtcacactcaagcgttggcccgccgtcgaagatgtcgatatagttgcggtaacgaaaaccttctttctccagcaccgcgcgggcaggcgcggtttgcggatgtacctgaccgatgacgtcctgggcttcctgggataaaaagtgggtatagatcggatgtttcggcatcagttctgcaataaatgccttttgcccggtgccgcagagaaaatcggcgcggctaaaatccatcgaaaagaagcgtttaccgaggctttgccagaacggtgaatagccgtgttcgtcaatcaccccgcgcatttcagcaaccactttgtcattaaacttgtcgcgaaaagccgccataaacataaagcgcgatttcgacagcaaatagccgttgccctctttgcgccagtccgggtcgagaaacagcgtgcacagctcgctgctgccggtgtgatcgttactgagaaacagcgtcggcaatgcgttatagacattcagctcttttgaggcgtgaaccaacgtgccgacgcgatagttgtaccagggatcgttcagcccaaccgccacctcaatggcacaaatccccgccacggtgcctgtctcgctatcttccagcacgaacacatagccctgctcacttttgggcagttcgccttgccaggttttgattgccctttcgatacgcgccgaaagcgtggcttcattggcgggaagcgacgtcaggccgccgcccgttttgctggcaagctgcatcagcgccgagacatctgatcgctcaacgggacggatgaccatcatgatgaacctcggctaacaaagtgttcgcaagcagctgcaaagcgatccagtccggtcgtcacctcttcttcgctgacattgagcgcaggcgcaaaacgcaccacgttgccacctgcaatcagtaccatcacgcctgctttcgccgcttcctgagagatctgtttcgcttgcccggcgtaatcggcattcagcacacagccaatcaacaaacctaagccgcgaatttcgctgaacaaaccgtagcggtgattaagggtattaagacgctcaacaaaccagtcgtgacgctgtttaacgccattaagcatctctggtgtgttgatgagctccagcactttgcctgccaccgccgaggccagcggattaccgccataggtggtgccatgagtgccaacggtcatcacgcgggcgcactcttcggttgccaacaacgcaccgaccgggaaaccgccgcccagcgctttggcggtagttaacagatcaggcgtcacgccgtagtgcatataggcatacagttccccggtgcgcccgacgccggtttgtacttcatcaaaaatcaacagcgcattgtggcggttacacaattcacgcagaccttgtaaaaacgcgttgctggctggcaccacaccgccttccccctggatgggttcgacaatcaccgcacaggtagagtcgtcaatcagcgcgctggcagagttaatatcgttatatgcagcatgacgaatatccgccggcagtggcgcaaaatcctgtgaataggctggctgcccacccgcactgacagtaaacagcgtgcgaccatgaaacgcatttttgaacgccacgatgccgctcttatggctgccgtagcggtcgtgagcgaatttacgcgccagttttagcgccgcttcgttggcttccgcaccggagttacaaaagaagacgcgatcggcaaacgtggcgtcgatcaattttttcgccagtcgcagtaccggctcgttggtgtaaccgttgccggtatgccagaacttactcgcctgttcgttcagcgcttcacgcagttccggatgcgcatggcccagcgcgttcaccgcaatgccacccgcgaagtcgatatactctttcccctgctgatcccacaagcgcgaaccttcgccacgtaccggtataaagggtgccggagcgtaaacaggtatcatccattcatcaaagttttcacgcgtaattggctgagacatagcgacctctacagtaaataattcgttatttatatgttaataataagtaatgtttgcgctgtaaatgtagattgcagggttcgtgccagccagtgataaaagtgcataaacggcggaggctaactggaaatcaaggagttataaccaaaccatatgcatttaaagtgcatataaagtgaatacgtttgcgatgtgggtgaataaaaagaataaaaaacgcaatgttatgcagaagtaaaatataattctggaattgtgatcattgacgaaatttactggaaattactgcgccattctgacgcagcgcgcaccaaaagcgggcattttttgcgccatcgttgacatcattaacaaccatcgatcaaatcacttaacaacaggcggtaagcaacgcgaaattctgctaccatccacgcactctttatctgaataaatggcagcgactatgaaatttgtctcttttaatatcaacggcctgcgcgccagacctcaccagcttgaagccatcgtcgaaaagcaccaaccggatgtgattggcctgcaggagacaaaagttcatgacgatatgtttccgctcgaagaggtggcgaagctcggctacaacgtgttttatcacgggcagaaaggccattatggcgtggcgctgctgaccaaagagacgccgattgccgtgcgtcgcggctttcccggtgacgacgaagaggcgcagcggcggattattatggcggaaatcccctcactgctgggtaatgtcaccgtgatcaacggttacttcccgcagggtgaaagccgcgaccatccgataaaattcccggcaaaagcgcagttttatcagaatctgcaaaactacctggaaaccgaactcaaacgtgataatccggtactgattatgggcgatatgaatatcagccctacagatctggatatcggcattggcgaagaaaaccgtaagcgctggctgcgtaccggtaaatgctctttcctgccggaagagcgcgaatggatggacaggctgatgagctgggggttggtcgataccttccgccatgcgaatccgcaaacagcagatcgtttctcatggtttgattaccgctcaaaaggttttgacgataaccgtggtctgcgcatcgacctgctgctcgccagccaaccgctggcagaatgttgcgtagaaaccggcatcgactatgaaatccgcagcatggaaaaaccgtccgatcacgcccccgtctgggcgaccttccgccgctaatttagcagctctcctggctcaaactgggtcaggagaattaaccttgagaaaaatcaacaaactgtcagtaatgatttgttgcctgccgtcctttgttataccgtctctgcttttttagttgtctgaccacttctctattatcaagtttgatataggaaactccacgatgaacgctgagcgtaaatttctttttgcctgtcttatttttgcgctggtcatttacgctatccacgctttcggtttattcgatctgctcaccgatttaccccacttacagacactcatccgccagagcggatttttcggctatagcctctatattctgttattcatcattgccaccctcttgctgttaccaggaagcatactggtgatcgcgggaggaatagtttttggcccgctcttagggacactactctcattaattgccgccacgctggcctcctcgtgctcattcctgctggcgcgctggctgggacgtgatttactgctgaaatacgttggccatagcaataccttccaggccattgaaaaaggcattgcgcgtaacggtattgattttcttattctgacccgcttaatcccgttgtttccttacaatattcaaaattacgcttacggattaaccacaatcgccttctggccttatacccttatttcggcactcacgaccctacccggtattgttatttataccgtgatggcaagcgatctcgccaatgaaggcattacgctgcgctttattttacaactctgtctggcgggcctggcgctgtttattctcgtccagctcgcaaaactctacgcccgacacaaacatgtggatctgtctgcttcgcgccgcagcccacttactcacccaaaaaatgaaggatagaacgatgttgcaacattattcagtgtcatggaaaaaaggactggctgcactctgtttactggctgttgctgggcttagcggctgcgatcaacaagagaatgcggcggcaaaagtggaatacgacggactttcgaacagccaaccgctgcgtgtcgatgccaataaccatacggtaaccatgctggtgcaaattaatggtcgtttcctcaccgacgacactcgtcacggtattgtgtttaaagatggctccaacggacataaatcgctgtttatgggttatgcgaccccgaaagcattttatgaagccctgaaagaggcaggtggtacgccgggcgaaaacatgacgatggataataaagaaacgactcatgtcacaggcagcaaactggatatttcggtcaactggcaaggggcggcaaaagcgtattccttcgatgaagtgattgttgacagtaatggcaagaaactggacatgcgctttggcggtaatttaacggcagcagaagagaagaaaacgggttgcctggtgtgtctggatagctgcccggtcggcatcgtcagcaatgcaacatacacttatggtgcggttgaaaaacgtggtgaagttaaattcaaaggcaatgcctcagttctcccggcggataacacgctggcaacggttacctttaaaatcgccgaataaagccaggataaaggatgatgatgatgcaatcgcgaaaaatctggtactaccgtataaccctcatcatcctgttgttcgctatgctgctggcatgggcgctgcttcccggcgtccatgagtttatcaatcgcagcgttgcggcgtttgccgccgtggaccaacagggtatagaacgctttattcagtcttacggcgcactggcggcagttgtctcgttcttgttgatgattttgcaggccattgctgcaccgctacctgcgtttttgatcacctttgccaatgcgtcgctgtttggcgcgttctggggcggcttgctgtcgtggaccagttcgatggccggcgcggcgctgtgcttttttatcgccagagtgatgggccgcgaagtggtggaaaaattaaccggcaaaaccgtgcttgacagtatggacggctttttcactcgctacggcaaacacaccattctggtctgtcggttattgccttttgtccctttcgatccaatcagctatgctgccggtttgacttcaatacgttttcgctcgttttttatcgccaccgggcttggtcagttaccggcaactattgtttattcctgggcgggcagcatgttaacaggcggtactttctggtttgtcaccggactgtttattctgtttgccctgaccgtggtgatttttatggcgaagaaaatatggcttgaacgccagaagaggaatgcctgatgggtttaccgccgcttagcaaaattcctttaattttacgtccacaggcgtggctgcatcgtcgccattacggcgaagtgctaagccccattcgctggtgggggcggatcccgtttatcttttatctggtgtcgatgtttgttggctggctggagcgcaaacgctcaccgctcgatccggtagtacgatcgcttgtcagcgcgcgcattgcgcaaatgtgcctgtgtgagttttgtgtggatatcaccagtatgaaagtcgccgagcgcaccggcagcagcgataaactgctggcagtggctgactggcggcaaagcccgctctttagcgatgaagaacggctggcgctggagtacgccgaagccgcaagcgtaacgccgccaacggtcgatgatgccctgcgtacccgactggctgcgcattttgacgctcaggcgctcaccgaactgacggcattgatcggcctgcaaaatctgtcagcccgttttaattctgccatggacattcccgctcaggggctgtgccgtattcctgaaaaacgttcttaaggagagatgatgcgccattgtgggtggttgctgggattgttatcgctgttttctctggcaacacatgccagtgactggcaagaaattaaaaatgaggccaaagggcaaaccgtctggtttaacgcctggggcggcgataccgcaattaaccgctatctcgactgggtgagcggcgagatgaaaacccattacgctataaacctgaagattgtccgtctggcggatgccgcagacgcggtgaagcgcattcagaccgaagccgcagccggacgtaaaacgggcggctcggtggatctgctctgggtgaacggcgaaaacttccgcaccttaaaagaggccaatttattacaaacgggctgggcggagactctgcccaactggcgctatgtcgacacacagctgccggtgcgggaagatttttctgtgccgacacaaggtgcggaatcgccctggggcggcgcacaactgacgtttatcgcccgccgcgatgttacgccacagccaccacaaacgccgcaagccttactggagtttgctaaagccaatcccggcacggttacctatccgcgcccaccggactttaccggcacggcgtttcttgaacagttgctgattatgctgacgcccgatcccgccgcattaaaagaagcgccggacgatgcgactttcgcccatgtcactgctcccttgtggcaatatcttgatgtgctgcatccgtatttgtggcgcgaaggaaaggatttcccgccttcacccgcgcggatggatgctctgctgaaagccggcacattgcgcctgtcgctgacctttaaccccgcgcatgcgcagcaaaaaatcgccagcggcgatttgcctgcaagcagttacagttttggctttcgcgaggggatgattggcaacgtgcatttcgtcaccattcctgccaacgcgaatgccagtgctgcggcgaaggtagttgccaatttcctgctctcacccgatgcgcaactgcgtaaagcagatcccgctgtctggggcgatccttctgttctcgatccgcaaaaactgcctgacgggcagcgcgaatcattgcaatcaagaatgccgcaggatctgccgccggtactggctgaaccgcacgcaggttgggtaaatgcgctggaacaagaatggctacaccgttacggtacgcattaatctttttgctgtgggcgatggtggcggtgatttatgcaccgctgatcccggcagctctcacgctgatatcgcctgctttgtcgttgacacactggcaggcgttatttgccgatccacagttaccgcaggcattactggcaacgctggtgtcgacaaccatcgcggcggtcggggcattgttgattgccctgctggtgattgtggcgctgtggcctgggccgaaatggcagcgtatgtgcgcccgtctgccgtggctgctcgccattccccatgtggcttttgccaccagcgcccttctgctctttgctgacggagggctgctttatgactatttcccgtatttcactccgccaatggaccgatttggcatcggtctgggcctcacccttgcagtgaaagaaagcgcatttctgctgtggatcttagcagcagtattgagcgaaaaatggctgttgcagcaggtcattgtgctggattcgctgggctacagccgctggcaatgcctgaactggctgctgttgccctccgtcgcgcctgcgctggcaatggcgatgctggcgattgttgcctggtcgctgtcggtcgtggatgtggcaattattctcgggccaggtaatcccccgacgctggcggtaattagctggcagtggttaacccagggcgacattgaccaacaaacaaaaggcgcgcttgccagcctgctgttgatgctgttactcgccgcctacgttttgctgagctatctgctatggcgcagctggcggcgcactattccccgcgtagatggcgttcgcaagcctgccacgcctttattgccgggcaatacgctggcgatttttttacccttaaccggtgtgctgtgtgtggttctgctggcgatcctcgcggatcagtcgacgatcaatagtgaagcgctcatcaacagcctgacaatggggctggtggcgacattcatcgctttgctcctgttactgctgtggctggaatgggggccacagcgtcgccagttgtggctatggttgcccattttattacctgctctgccactggtggcgggccagtacacgctggcgctatggctgaaactggatggaagctggacggcggtggtctgggggcatctgctgtgggtgatgccgtggatgctgtttatcctgcaacccgcctggcagtgcattgattcacggttaattttgattgcgcaaacactgggctggtcgcgggccaaaatcttcttttacgtgaaatgcccactcatgttgcgccctgtgctgattgccttcgcggtgggatttgcagtcggtattgcgcagtatatgccaacgctgtggctgggcgcggggcgttttccgacgctcaccactgaggcggtggcattaagcagcggcggcagcaacggtattctcgccgcccaggctttatggcaactgctattaccgcttattatttttgccctgaccgcgttagtcgcaaaatgggtaggttatgtcagacaaggactccgctaatgctctgcgtgaaaaatgtttcgctacgtttaccagaaagccgcttgctgacaaacgttaactttacggtggataaaggtgacattgtcacgttaatggggccgtctggctgtggaaaatccactctgttttcatggatgattggtgcactggccgaacagttttcttgtacaggtgagctatggctcaatgagcaacggattgacatcctacccaccgcacagcgtcagattggcattctttttcaggatgcactgttatttgaccagttcagtgtcgggcaaaatttactgctggcgctaccggcgacacttaaagggaatgcccgacgtaatgccgtgaatgatgcacttgagcgttcaggccttgagggagctttccatcaggatcctgccactttgtctggcggtcagcgagcgcgcgttgctctactacgcgcccttctcgcccaaccaaaagcgttactcctggatgagccattcagccgtcttgatgtggctctgcgcgataattttcgccagtgggtgttcagcgaagttcgcgccctggcgatccccgtcgttcaggtaacgcacgatctccaggatgttcctgctgatagttctgttctggatatggcgcagtggtcagaaaattacaacaaactgcgataacgcaaagtttttctcaatgcgtcagttcagaatggcgcactcaaaactacaatgtcgggattttcgatgaaacgtgtttctcaaatgaccgcgctggcaatggctttagggctggcttgcgcttcttcgtgggccgctgaactggcgaagcctcttacacttgaccagcttcaacaacaaaatggcaaagcgatagatactcgccccagcgcgttttataacggctggccacaaaccttaaatggcccttctggtcatgaacctgccgccttaaacctctctgccagctggcttgacaaaatgagcaccgaacagctcaacgcgtggatcaagcaacataacctgaaaaccgatgctccggtggcgctgtacggtaatgacaaagatgtcgacgccgtcaaaacgcgactgcaaaaagcaggtttaacgcatatctccatcctgagtgacgcgctaagcgaaccttcccgtctgcaaaaactgccgcattttgagcagctggtttatccgcaatggctgcacgacctgcaacaaggtaaagaggttacggcgaaacctgccggtgactggaaagtcattgaagcggcctggggcgctcctaagctttaccttatcagccatattcccggcgctgactacatcgataccaacgaagtggaaagtgaaccgctgtggaacaaagtttctgatgaacaactaaaagcgatgctggcaaaacacggcattcgccatgacaccacggtcattctgtatgggcgtgacgtatacgctgcagcgcgtgtggcgcagattatgctttatgctggcgtgaaagatgtgcgcctgctggatggcggctggcaaacctggtccgacgcgggactgcctgttgagcgcggaacgccaccgaaagtgaaagcggaaccggatttcggcgtgaagatcccggcacaaccgcagttgatgctcgatatggaacaggcccgtggactgctgcatcgccaggatgcatcgctggtgagcattcgttcgtggccagaatttatcggtacgaccagcggttacagctatattaaaccaaaaggtgaaatagccggcgcacgttggggacacgctggtagcgactcgacgcatatggaagattttcataacccggatggcaccatgcgcagcgccgatgatattaccgctatgtggaaagcgtggaatatcaaaccagagcagcaagtttcattctactgcggcaccggctggcgcgcgtccgaaacctttatgtacgcacgcgccatgggttggaagaatgtttccgtgtatgacggcggctggtacgaatggagcagcgatccaaaaaatccggtagcaaccggtgaacgcggcccggacagtagcaaataacattgcaattactgacgctggagcgacttcagcgtcagatacccactccacacccgcgtaaaggtcgtcatccagcacaacgcaccgaagatccacgcaaaccacgcaaaccatgcagggaataaacatcccagcacaaacagtaagatcgtttctgtgccttcggttaatccccccagatagtaaaacgacttatgtgcataaccggggttatcaatctgatgttttgctgccagtgcagcaaaggcgagaaaactgctgcccgtgccgataaacgcaaacaacaaccagccgcctgccagcgcattttgctccggtgcagcaagaataaagccaaacggcaccagcgcgtaaaagagaaaatcgagagaaatatcaagaaagccgcccgcgtcggtaagctctctgcgccgcgccagcgcaccgtccagaccatcaagcagcctgttcaacaaaatgacgactagcgccgccagataccagcccagcgccagaaacggcagagccagcacgccgatggcaaatcccactaatgttaaaccatctggcgtaatgcccggtttatcaagaacccgcacgcactgatgcaacaacggtttaatccggggatgaagatggcggtctagcacaggcactccttaaatataaagcctttctgattgagcaacagtgcggatattatggcatttttcgcttatctgcccgtgtgtaatttatgaaaatgattgaagttgttgccgccatcattgaacgtgatggcaaaattttactcgcgcaacgccccgcccagagcgatcaggcgggattatgggagtttgccggtggtaaagtcgagccggatgaaagtcagcggcaggcgctggtgcgtgagttacgcgaagaactgggcatcgaagcaactgtgggtgaatatgttgccagccatcagcgagaagtttcggggcggattatccatcttcatgcctggcacgtacccgacttccacgggacgttacaggcacatgaacatcaggcgctggtctggtgctcacctgaagaggcgctgcaatatccgctggcccctgctgacattccattattagaggcgtttatggctttacgcgccgccagaccagcggattagtgctaagggttttgtcatcacgctggcattgcagcagtattccttcggctttaattaccgccccttcagaataattttgatcctgataaacgcagcactgagtacagggctgcgctgactgcccgcctgaactgaacacttctggcggtacgtttacctccacgtccggacgataatgcgggttagccagtgcaattaatggaaatgctaatactacggcgaacaatgctcgactcacagggaactccttaacgttattgtctctgctactgataacggtagccgggtggcaaaactttagcgtctgagttatcgcatttggttatgagattactctcgttattaatttgctttcctgggtcatttttttcttgcttaccgtcacattcttgatggtatagtcgaaaactgcaaaagcacatgacataaacaacataagcacaatcgtattaatatataagggttttatatctatggatcagacatattctctggagtcattcctcaaccatgtccaaaagcgcgacccgaatcaaaccgagttcgcgcaagccgttcgtgaagtaatgaccacactctggccttttcttgaacaaaatccaaaatatcgccagatgtcattactggagcgtctggttgaaccggagcgcgtgatccagtttcgcgtggtatgggttgatgatcgcaaccagatacaggtcaaccgtgcatggcgtgtgcagttcagctctgccatcggcccgtacaaaggcggtatgcgcttccatccgtcagttaacctttccattctcaaattcctcggctttgaacaaaccttcaaaaatgccctgactactctgccgatgggcggtggtaaaggcggcagcgatttcgatccgaaaggaaaaagcgaaggtgaagtgatgcgtttttgccaggcgctgatgactgaactgtatcgccacctgggcgcggataccgacgttccggcaggtgatatcggggttggtggtcgtgaagtcggctttatggcggggatgatgaaaaagctctccaacaataccgcctgcgtcttcaccggtaagggcctttcatttggcggcagtcttattcgcccggaagctaccggctacggtctggtttatttcacagaagcaatgctaaaacgccacggtatgggttttgaagggatgcgcgtttccgtttctggctccggcaacgtcgcccagtacgctatcgaaaaagcgatggaatttggtgctcgtgtgatcactgcgtcagactccagcggcactgtagttgatgaaagcggattcacgaaagagaaactggcacgtcttatcgaaatcaaagccagccgcgatggtcgagtggcagattacgccaaagaatttggtctggtctatctcgaaggccaacagccgtggtctctaccggttgatatcgccctgccttgcgccacccagaatgaactggatgttgacgccgcgcatcagcttatcgctaatggcgttaaagccgtcgccgaaggggcaaatatgccgaccaccatcgaagcgactgaactgttccagcaggcaggcgtactatttgcaccgggtaaagcggctaatgctggtggcgtcgctacatcgggcctggaaatggcacaaaacgctgcgcgcctgggctggaaagccgagaaagttgacgcacgtttgcatcacatcatgctggatatccaccatgcctgtgttgagcatggtggtgaaggtgagcaaaccaactacgtgcagggcgcgaacattgccggttttgtgaaggttgccgatgcgatgctggcgcagggtgtgatttaagttgtaaatgcctgatggcgctacgcttatcaggcctacaaatgggcacaattcattgcagttacgctctaatgtaggccgggcaagcgcagcgcccccggcaaaatttcaggcgtttatgagtatttaacggatgatgctccccacggaacatttcttatgggccaacggcatttcttactgtagtgctcccaaaactgcttgtcgtaacgataacacgcttcaagttcagcatccgttaactttctgcgatagcagcagatatgccagtaaagaaatcccatttgactatttttttgataatcttcttcgctttcgaacaactcgtgcgcctttcgagaagcaagcattatataatgccaggccagttcttcttcaattgtcccgttttgaaaagctgtgcttgatatcgagatcatccatgataattccgccgcccatattagcttcgccgaggatttaccggagctatgattagcgcaatcagagatatagtctgagggaaaaacagcaaatttattcaacaaggcgataacctgctctggggcttcctccatgtttgctttaaaggtattggctccatggtcgccagaaagaaaatgctccattaaggcacaataactttcgctatcttcgataccccattgatcctctaaagactcgcgtcttttacttatgatatcgatcgagtcaaaaggaagcacatgatattggaaggtatctttgccaggttcaggctttcgcggccagaactccagcgtttcagaccattgcttatgatagaatcgataaggtgcgatcaattgtagcgcctgtaacttctcgatactgagcggctcaatacctttagcctgataataatgcagttgttctttttttgctttaaaaccggcccgaacaataagccccatcataattaatagataaagaaaagagcatcccgcggtaatcaggcctctttcattcaaaccgttggatgttatcgctgcgaacacaaacattacagcgacaacacatgttaaataaaacccccacttacaaagcagcatggccttattttctttaatcatccgttcaaaattactattaaatatttcccagccattaaaagaatacttctcgctcccaggatggttttgtaataaaacttttttcatcacattccctgttattacatactttagaggcgataattttatccatgcaaaaaaaatatccaacgaattttcttgatccgctggatatttcagaatatgactcgaatagcacgaaagattcactcgcttacgctatcgccccgcttccgacttcatctgctggcggactttttttcgcactacgtttacgcggtgcagcctttttcttatcagcactgccaccactgcccggagccacaatgccgcgaaactgccgcaccggcgtacgtttggcttgatcaataagctgatatagcgtccccaccagcggctgcataaagtcctgatagcgacactgcttttcgctgatttgcgtcagcaccgattcccagtgcgcggtcatgtccggtcgcgtcgccatctccggcagcgaatggaatagcgcttttccggcgtcggtggagtggatatagcgcccttttttggtcaggaaaccacgcttgaacaacagttcaataatcccggcacgcgttgcctctgtccccagaccatcggtcgcacggaggatctttttcagatctttatcctgcacaaagcgcgcgatcccggtcatcgccgaaagcagtgttgcatcggtaaaatggcgcggcggctgggtttgccgctctacctcttcacctttttcacacagcaactcatcgcctttcgccaccacaggcagtggcgtgccgtcgttttcttcatcgcgctctttgctgcctaacagcgtgcgccagcctgcttcagcaagaaaacgcgctttagcgacaaatttgcctttggcaatgtccagttcgataacacacttgcggaacaccgcatccgggcagaattgcatcagatactgacgggcaatcaggttatagaccttcgcttcgttctccgtcaggttgatcgcagaactccgtgcggtcggaatgatggcgtggtgcgcatcgacctttttgtcatcccaacagcggttgcgtatatctggatctaccactggctgcggcaacagatccggtgcatgaacactgatggcattcatcaccgcgtggcgtccggcaaaatgttcttctggcaaatagcgacaatcagaacgcggataagtgattagcttgtgcgtttcgtacagtttctggcagatatcaagcacgttctgcgcactcagaccaaaacgttttgccgcttcaatctgcaacgctgaaagcgaaaaaggcagcggcgcggattctgattcccgtttatcgttatagctggtgacaatagccggttgaccactaatgcggttaaccacatgctccgccagtggacgatgtaacaagcgcccttcttcatcctggtacggttcacacgcttcgctcggttgccagatagcggtaaaccgctcatcggcaggtgtcacgatatgtgctttgacttcaaagaagtctttcgccacgaagttttcaatctcttcatcgcggcgcaccaccagcccaagcacgggcgtctgcacgcgtcccacggaaagtacgccctgataaccggcattgcgaccgagaatggtatacgcacgggtcatattgatgccgtacagccagtcggcacgcgctcgcgccagcgcagaaacgcacagcggtacaaactcactgttggaacgaagacggtcgatcgcccgctcaaccgcctgcgggttcaggtcgtttatcaagcaacgctgtacctgctggcgcttttccggtgccagttgcagatagtccagcacttcatccaccagcaattgcccttcacgatccgggtccccggcgtgaacgatttcgctggcttcatgcaggaaccgtttgatgacgttaagttgtttggtcacggagggtcggggctgtaattgccacttttccgggacaatcggcaaatccgcaagattccagcgcgcatagcggctgtcgtaggcgtctggctgcgcctgctcaagcaggtgaccgatacaccaggtcaccacctgaccattaccgcactcgataaagccatcgcctttccggtgcggtttgggcaggacatcagcaatggcgcgcgccagactcggtttttcggcaataaacaaccgcattgaattaacgaatctcaaccatggcacgaccgccgcgcgctggcaccagttcgccaattgccgtcagttcaatgccaaactcggcggctgtagctttgacctcattttctgcttccggcatgaccgccagcagcaaaccgccagaagtttgcggatcacacagcagatcgcgcacttcacgcggcatttcacccatcagatgaccgtagctggcaaagttacgttcagtgccgccaggtactgcgcccaacttaatgtactcttcaacaccggggagtttcgggatcgcttcatagtcgacgcgtgcctgcacaccagccccctgacacatttcgctcaagtggcccagcagaccaaagcccgtaacgtcggtcatcgcttttacgccttcgatgttggcaaaggacgcgcctgcgatgttcatccggcacatcacttccgtcgccagtccctgatgttctggtttcaacagtgattttttctcagccgtggtaagaacgccgatccccagcggtttcgtcaggaacagtttgcatccggcttgtgcggtactgtttttcttcacccgctcggtcggtacgatccccgttaccgccagaccaaaaatcggctccggcgcatcgatggagtgaccgccagccagcgcaatacccgcctgacgacatgcatagcgtccaccttcggtcacttcgcgggcaatttctggggaaagtttgttaatcggccagccgaggatcgcaatcgccataatcggtttgccccccatcgcgaagatatcgctgatggcgttagtcgccgcaatgcggccaaaatcgaaaggattatcaacgatcggcataaagaagtcggtggtactgataacgctggtgccattgcccagatcgtacaccgccgcatcgtcgcgggtttcattacccacaagcaaattcggatcaacaaacttcgcctgctcactgtgcaggatggtttccaacacttttggggaaattttacagccgcaaccagctccgtggctgtattgggtcaaacgaatcgagttctcgctcatggacatctcctgtcaatgcaatccgggtatggtaaccctcattccgtgaagtgataagtgagagtgtctgaattcctgcgcctttgctcacaatccagacagtttcgcgacaattatcagaaataagttacaaacggcgtcgggtccgggacgttaatcgacgtagatgctttcagctgcggcgtaccgaggtagagaaaaccgacaattttatcctgctcacggcaaccgaatgcttcacgcactaccggactttcagttaatgcgccactgcgccagatgccgccaaacccctgggcaactgctgccatttgcatcgccatgaccgcgcatccggcagacatttcctgttcccagcgcgggactttatgattctcttcgcatttcgccaccaccgtgatgatgagcggtgcgcggaacggcgcattacgggctttgtcgatagctttgtcatcactaccggcagcaatcgccccctgttccagtacggcgctgaaacgctcgcgcccttccccttcaatcacaaaaaaatgccacggttgcatggacttatggtccggcgcacgcatacccgcacgcaggatgttttgcagttgttcacccgttggcgcgggttcagccaagcgggaggcgctacggcgattgatcaatagttcgagtgcatccatttgattaactcctgtcgtgatatttattcacaaaattaacacgagagtggattttgttacagcacagtccgcaattcctgctgacaagtaccggttgggtcattacgataaccacatctattgcgcctgtgacaggtgtgaccttaagttgggagaatacatgcgaaccctttggcgatttattgccggattttttaaatggacgtggcgtctgctgaatttcgtccgtgaaatggtacttaacctgttctttattttcctcgtactggttggtgtggggatttggatgcaggtcagtggtggtgattcgaaagaaacggccagtcgtggcgcactgctgctggacatttctggtgtgatcgtcgataaacccgacagttctcagcggtttagtaaattaagccgccagctgcttggtgccagttccgatcgtctgcaggaaaactcactgtttgatatcgtcaacactattcgccaggcgaaggacgaccgcaatatcaccggtattgtgatggatctgaaaaacttcgcaggcggcgaccaaccgtctatgcagtacatcggcaaagctctgaaagagtttcgtgacagcgggaaaccggtttatgccgttggcgagaactacagccaggggcaatattatctcgccagtttcgccaataaaatttggctgtttccgcaaggcgtggttgatctgcacggctttgccaccaacggtctgtactacaaatcgttgctggataagctgaaagtttccacccatgtgttccgcgtgggtacgtataaatctgccgttgaaccgtttattcgtgatgatatgtcaccggcagcccgcgaagctgacagccgctggattggtgagctgtggcaaaactatctgaatactgttgccgctaaccggcagatccctgctgagcaggtattccctggcgcgcaagggttgcttgagggtttaaccaaaaccggtggcgataccgcgaaatatgcactggaaaacaagctggtcgatgcactggcatcgagtgcggaaatcgaaaaagcactgaccaaagaattcggctggagtaagactgataaaaattatcgcgccatcagttattacgattacgcattgaaaacgccggcagataccggtgacagcatcggtgtcgtctttgctaatggcgcaattatggatggcgaggaaactcaggggaatgttggcggtgataccactgcggcacaaatccgcgacgctcgccttgacccgaaagtgaaagcgattgtcctgcgtgttaatagcccaggcggcagcgttaccgcgtctgaagtgattcgcgctgaactggcagcagcccgggcagcgggtaagcctgtggttgtatcgatgggcggcatggcggcatctggtggttactggatttccacgccagctaattacattgtggctaaccccagcaccctgaccggttctatcggtatcttcggcgtgatcaccaccgtagaaaatagtctggattcgattggtgttcataccgatggtgtctcaacttcaccgctggcagatgtttctatcaccagggcactgccgccggaagcacagcagatgatgcagttaagcattgagaatggctataaacgctttatcacgctggttgctgatgcgcgtcattcgacgccggagcagattgataaaatcgcccagggccacgtctggaccggtcaggatgcaaaagctaacgggctggtcgatagcctcggggatttcgatgatgcagttgccaaagcagcagagctggcaaaagtgaaacagtggcatctggaatactacgttgatgaaccgaccttcttcgacaaagtgatggacaacatgtctggttctgtccgggcaatgttgccagatgcgttccagaccatgttacctgcaccgctggcctcggtagcctctactgttaaaagtgaaagcgacaagctggccgcgtttaacgacccacaaaaccgttatgcgttttgcctgacctgcgccaacgtgcgttaagtcttgtactgagtggccgacagatcgtcggccacattattttttacgtcgacgaatcctcttcccgctgtctcgccccatatttccttatccgcatagtatcaggtgcgctcctcctgcctcacgtatatacttttgctctttcgatatcattcatatcaatatcatgcaaaagaaatcaatttacgtcgcctacacgggcgggaccatcgggatgcagcgttccgagcagggttatattccggtgtcaggtcatctacaacgccaactggcgctgatgccggaattccatcgcccggagatgccagatttcaccattcatgaatatacgccgttgatggattcttctgatatgactccagaagactggcagcatattgctgaagatattaaagcgcactatgacgactatgatggttttgtcattctgcacggcaccgatacgatggcatataccgcctctgcgctgtcgttcatgctcgagaatctcggtaaaccagtcattgtgacagggtcacaaatcccgctagctgagttacgctctgacggacaaattaatctgctgaatgcgttgtacgttgcggcgaattatccgatcaacgaagtaacgctctttttcaataaccgattgtatcgcggcaaccgcactaccaaagcccatgccgatggttttgatgcgtttgcctctccaaaccttcctccgttactggaagcaggtatccatattcgtcgtttaaatacgccacccgccccgcacggtgaaggggaattaatcgttcatccaatcaccccacaaccaattggcgtagtgacgatttatccagggatttctgctgacgtcgtgcgcaattttctgcgccaaccggtgaaagcattgattttgcgctcctatggcgtgggtaatgcgccacaaaacaaagccttcctgcaggaattacatgaagccagcgatcgcggtattgtggtggtcaacctgacacaatgtatgtccggtaaagtgaacatgggtggttatgccaccggtaacgccctcgcccatgccggcgttattggcggtgcagatatgactgtagaagccacgctaaccaaactgcattacctgctgagccaggaactggatactgaaaccattcgcaaggccatgagccaaaacctgcgcggcgaactgacgccggatgattaaggagactgcaatgccccctcgcgccctgttactggtcgatttacaaaatgatttctgtgctggtggcgcgctcgccgtgccggaaggtgacagtacggtggatgtcgctaaccgcctgattgactggtgccagtcgcgcggtgaagcggttatcgccagtcaggactggcacccggcgaatcacggcagttttgccagtcagcacggtgtagagccttatacgccaggccaactcgacggtttgccacaaaccttctggccagatcactgtgtgcagaacagtgaaggcgcacaattacatccgttactgcaccaaaaagcgatcgcagcggtgttccataaaggcgaaaatcctttagttgacagttacagtgccttttttgataacggccgtcggcagaaaacctctctcgatgactggttacgcgatcatgaaatcgatgaattgatcgttatgggcctggctactgactattgcgtgaagtttaccgtgctggacgcgttacagttaggttataaggtaaacgtgattaccgatggttgtcgtggcgtgaatatccagccacaggacagtgcgcacgcgtttatggagatgtcagctgctggggcaacgctatatacgctggcagactgggaagagacacaggggtaattttacgctggcctacaattctgtactggcattgtaggccaaataaaacacgtcagtggcacatctggcaattgatgccatcaacgaaagatttaattcacctcagaaatctcttccaacgacaccttccgcgtttcgatgccaaaaatggagagaaccagcgcacagagcaataacatgacaccaagtactataaacaccgtgatcgacccataatgtgttaataatgccgcaacgccatagggcgtgaagactgcgacgatccgtccgacggcattaacgaaacccgaaccgcgcaggcgtaaatgcgttggccaaagctccgggatataaaccgccgacgcgaagcaaacatacatgtataaaaagaagatcatcaccaggccatagattaaaatcgcccactctgtagtctgaattgaatagatatagcctaacacggcaataataataagtaaggtggagccaaataaccgacgaggaaaatgatcaataattaatgccgcaataaatattcctaccggagcgccaatcataataacagcggtcattaatattgatttatcgacatcaatgccggagttaacaaatatggtcggtatccatacggtgatggtataaagcgaaatgttcattgcaattaaaacagtaatcgcgactaatgtacgtcgtaacatttcacctttaaacaggagccagtaagtacccttgattactttaactttgctgttgctctgatacgaagtaagcgggggtaaacgaatactcttctctctttcaatttgctgctctacttcacgaagttggcattctgcacctgcgatttgccctttccctgccagccatcgtggcgactcaataaagtatttacctgagagaagccaggctaacagtatgccaataccacccaacagaaacattatccgccaactaaaaaaagcgataaccaccacacctatcgccgcagacagcatgggcgaccagttaccaacaaatgagagccgcgcggaccattttccacgcaccgtcgcggggataaactccgtaaatgaggcatagccaaccataatcagcgcccccattcctgttcccatcaggaagcgaaagaagatgagccagtacatatcagggacaaaagcggcccctgttgcagcaataccgacgatgagaagatttatgcgaaacgccctgcgccgcccaaagtaatcaccgatgaacccaccggtaagagagccgatgaaataaccaaacattaatgccgaggtaaaggcggcattgaggaaattatttgaccatccattgcttaccagctttgctaagacaacattaccggagtaactcaaaaaacccgttaataacagactaaagcttattataccaaatatacgataatgaaaccgggccaaaggcaagcggtccagtcttgcgccaatttgatcatattgttccattgggtgcctcggatttgctaaaaaaggtagcaattgcggcaaattcacttgccgcatctttatcatcattttatttcaaggcgcaggaacaaataatattgacaacgtgtgcttaaattaccacaccagctggatattattgtctttgcaaaatgctatccactctgcacccggtgatttatcagttattatgtaattaatatgactaaaatcagctaactggacaaaagctttgcgatcaaacttagagtgatcaaccaataacgcaacttctgtcgcctgacggatcattgtctttttgatttcagcttccgcttcattagagtccagcgcgccgctgttaatatcaagacctttacaattcattaccatgatatcgacatgatagcggctgatgatctctttagtaattcttccttgcagtgaaagtgtatttttgtttagttccccacccgttgaaacgactttaatttctgactgagccagaacatgaatcgcttccgccgagttggttagcaacgtcaggtcactacggtcctgtaacaatttgagcaattccattacggtactactggaatcggctgccatggtggttttattgtcgataaagggtagtgccttgcgtgcaataagctgcttctcttcataaaacgatgaagcgcgcttataaaaatggatattctccgtcaacatcgctgtatttaaaacagcaccaccataggttctggtcaaaaagccttcatcttccagcttctcaagatcgcggcgaatggtttcttcggttacctgaaaaatcccactcaaatttgagactgtcacttttttatcgttggcaaccatttgcttaattgcctgaatcctgtcttttgccgccacgattacacccctgtatctttttacatcacattagcgcgattatcgcataaccgatgtttactttcaaaacaacctgtttgaatcacagattttcatcacagttttcacagaaacagaggtgaatcgtgttgagtatttaacgctccagggcctctgccatttccctcatcaatgttgcgtctgcatccgataagttgataatcagtgccgcgacattttcgcgtacctgttccggtgcagtagccccactaagaatggagattaaatcactctgttttaatatccacgccagtgccagagtgggaattgtgcactgataacgagcacaaagtggctgccactgttcaagcatatcaatcactttcagcatgttttcacgctggaaccagactttatttgcccgagcgccgcccggaacgtaatcacgagtgatggtgccggtcaacaatccctgctctagcggggaataaacctgaaccacaatgccattatcacgacatagcggcagcagttcgttttccattgcccggtcgaggatactgtatttcgcctgaataatatccagttcaccatattgcagatactcgcggatatggtcagcatcgacgttagcagcgcctatagcgcgaattttcccttcagccttcaactcattaagcactgcgacagtttcagcgatcggcgtaaaaaatggcggcaccgactgccagtgcgtcatgtagatatcgatgtaatcaatacccagacgttgcaagctggcttctacctcttcgcggatagattccggggaaaggtttttatacaactgccgatcgccaactttgttgaataaacttccttttcgttcccagacaatgccgcatttggtttctactacaacctgttcacggggcagtttttttaacgcctgaccgacgataacttcactattgccaaagttatatcctggcgcagtatcaatcagattaatgccgcaacgatgggcttcaagaatcgtatcaatacatatttgccgatcgagatcgccattccatgcaggaccgccgccaatggcccatgtccccaaccccattcgcgaaagcgtaatatccgttgtgcctaaaggtatctttttcatttgccttcattatccttcgtattcttccagcaattgttcgaccagctttctgttttttacgccggtggtggcaccgacgcttagaaccgagatagccgccgttgcattggcaaagcgtgcgcattcacgcagatttttgccttctaacagtgccgcaataaaacctgaagcaaagttatcgcccgcgccaatggtgtcgatggcggttattcctgcgaccgccggcaccttcatcgtcatgtcaccacgcttgataaagcagccgtctttacccgttttaatcaccaccgtttttacgccgcacgcaagaaagcagtcagcaatttcatccaatgtctctttcccggtgagtaattttgcctcggcataattaggaaacagataatcgacataactcaatgcttcgcaaatatcatccagcgtttcattcaaccgcggtttgatcatatcggcacagataatcatctgccgggttttagcttgcgtaaaaatttctgttagcgctttaccatccaatagaggactgttgaaaatactggccagagataataatttcgcctgagaaaaccgcgaaaaatcaacatcgtcaatattcaatttccacagactgccgttacggtttgtgacaaacgtccgctcgccatcctccgtcaccagtccaacgttaatagaggtatctatgctgacgtcctgcttcaggctttgaatatcaatattctctttgcggcaatggtcgagaataaactgtcctgcggcatctttaccaatacggctcattaatgctgtacgatggcccagacgagaaataattgttgcttcatttattgcatcacccccggtggtcattgcgattctttcaagaggataagaatccacatcaaagatatttttactgaccggttgcaatggaatatcaacaatagcggcacctatacaaataacgtcgagattatccatatcattattccgctttgccatcagaaccgaacagtttaattttttccaatgcccgttcttttacagctttacgtacttcacgttctaaatgcaggaaaggctgatcctggttttctttcactgcgaccattgcggcctgacagagctccgtatgaatgttgattttcgcgatacccaacgaaattgcagttttaatgtcggcatcactgatccccgatgcaccgtgcaaaaccagcggaacagaaacggcatcacgtacgcgtttgacgacctcaaagttcaattgtggctctgacgtataaaccccatgctggttgccgatggcgacagccaatgagtcacagcccgtacgttcaacaaattcagccgcctggtcaggatcggtatagtgatagcccgccagcgcttcctcataaacggtttcattaccgacatgccctaattccgcctctaccggaatacccagcggatggaagaaatcgacagcctctttggttaaacgaatattttcttcgaaatcaaatgcagaagcatcacgcattaatgaattcataccatgagtccaggcgttatgaataatctccatactccgaccatgatcccaatgagttattaccggcacagttgcttttcgtgccattgataccatcatgtgagagaaatcttcaaatgaggtgttgccgacaaaacctgtaccaaaagaaataataaccggtgatttcgcttcttcggctgcgtcgataacgcccatcaatatttctgcattccatacgttaaaatgggcaattgcataatgtttatttgtggcatcgttttcccaatatctgatatctgcgagcatattctgttctcccgtattaattaatcgctaattttaataacgcctttaataatgtcgcgtttgttgttaactgactcttcaaatgcctgttgtacatcccgataatcgtaaatatgcgtcaccatcgatttcacatcgaatcgccctgaagaaatagcttcaatcgtgaccggataacgattggcatagcggaataccgtctggatagtgacttcgcgattgattttgaggaaattgattgccgaatcgcccggtacagtaccaacaatcataattttaccgccgcgcattaccagataaggtgcctgtttaatggtgaccgcagaacccgctgtttcgaaaacaatatctgcgcccatgtcttcggtaaattgctgacagcgtgaaatagtgtcttcttttgtgccgttaataaccactgtcgcaccaagttgttccgccattatcagacgtttttccagcacatcaacgacggcaatttccgttgcgcccaggcatttgcacgcttgcaacgtcatcaaaccaatacaacctgctcccagaataattatcttcttacccggtttaacatctgccagcatcgcggcatgcatcccgactgcggcaggctccaccagcgccccttccatcgtgtccatattgtctggcagtttgtaagtaaagctctccggatgacacagatagtgcgttaatgcgccgcggtagttgggttgtgtcgccataaaatcaacgtccgggcagatgttatatttgccttccagacagtaacgacagtgaccgcaaggaacgccaggttcgatatttacccgatcccccggtttaaatttgcgcacgcggcttcccacagccacaaccgtcccggcgcattcatgacccaggccaatttcttgatttgggtctttaggcggaataaacgggcctgattcaaaaccatgtacatctgaaccacaaataccgacatattctactttaatcaaaacttcatcttctttaggcactggtatttctgctgaaataattttcattgtgcccggcacctgcaatattgcttttgaatttttcattttgaatccacccgtattatttattggctactgcatcaatacttaaactttcaacggagacacctttggtttcaattccaatggtggcgatagcaattgcgacaacaattgaaacagcccccagaagaataaagactcccgttacgccataactactgagcagcactgcaacggcataaggtgcggcaataccactgattcgccctaccgcattcgccagaccggagccacggagtttggcctctgtcggccagatttcagggacatacactgccgaggcatagcaaacgtacatatagacgaaagtaatcaggaagaaaccaatcaacgttatgagcaacatactggtttgcagtgaatagatatatccgagcaccgcaatcaggattaatagccccacacccattgttttacgcggaattttatccatcaccagcatggcaataaaaataccaaatggcgcgccaaacatactcatggtatttaaaacaatcgagtcttttaaattaatcccctgggtcatgaatattgttggcaaccagttaattagtgtgtactgcacaacgttcatggcaatcagcacacaagagcctaatatcacgcgtttcagtaatactcctgtcagtaaggctgaatacggcaccgcttgtggcgctttaccgtcatcagcaataaccacaggcggcaaaggtttacccgtctggcgtatgacgccttcttctatactccgcatgactttctcggcttcttgataccgtccgcgcgattccagccagcgcggggattcaggaaagtagcgccaggccagcgccgtagcgataagcgacaatattgcagggataagcagttgtacccgccagttccactctgcactaatcagcggcgtgagtcccatcgcaatcaatgaacagagcggatatgaccagttgccaataaaggaaacccgactggaccacgttccgcgatttctaccgggcatatattcggtgaaaccagcaaacagtgtaaccagtaaagctcccagcccaactcccatcacaaaacggcaggcaataagaaaatccatattcggtgagaaagcaccgacaaccatcgaggcaatatgaatggcctcatagaggatgaacgcatttctgcgaccggttttgtcgccaatgatgccgcccaccagcgcaccgagaaacattccggcggtcgtgattgctgagaatgtggctgtggtggaattatctgtccagcccaacgctttcagctgcgcgaggatcaagccaccaacggcattactccagcagacaagcaagccaaacgcgacgatggcaaacattgatgaatgccagcggcaatccggtaagcgatccagccgtgcaccacaatgcggttttgttatctgttccatgcgataacgttccttcaggagagtggttattcatcaaagtcgtaagtcatgatcactttgattgcggttttatcgaccatcgcatcaaacccttcgcgccattgcgacaggccgatacgatgcgtaatcatcggtttgactttgatagcgccgctggctaagagcctgatagcgttacgccatgaggtggagtcataggccatatgcccaatgatgcttttgttccaggcggtaatgtcattaatcgagaaatcaagaggtttgaagcccattccaacgcgtaccacttccccgttcgggcggagcatttcgatggcttgtttcagtgcgatattggcaccggagcattcaatcaccagtcccagattgtctttgccacaaatttgctggcagcgcgccaccacatcttcggtagaaccatttactactgccgtcgcacccagttcttttgcaaccgggaagcggaccgccacatcttcttgcagaccaacgacgacgatatttaccgcccccataattcgcgccatttgtacggagaacagcccgagtgggccagtgccgatgacgaccacatcctgaccaggaaggaatttcgattgctgcgcgatggatttgtaggcattacagatagggtcaagtacggctgcgtcctcataatcaacaccatcagggatttcccacaacgcatgacgatgaattttgagaatttcaccaggaaccagacaatatttggaaaaaccaccgccccaggtattattatccagaccaaggtttactttttctgtacaacacagaaaatcaccttattcacaggccggacaaacaccgcaaacgtgaccgctgttatccgatacgacgcgttgccccactttccagtctttgactttttcaccaacctgcgcaatacaacctgcgaactcatggccgcggatagagttaaactcatcagaaccgctatcgacattgtagtgcttcatgtctgcgccgcagattgccgcggctttaatttcaatcactacatcttccgggccacacatgggttgtgggacatcaatcatcttgtagccgccaaaggccttgccaaaccgagccagtgctttcattgcgtcatcctctgtgtttagttttgcttagatggccatcatacttacccacatgatttttgaggtcaacattaaatctgtaaaacacagataatgatctgcgttttacaactcagatcacaattacgcagaaaatggctgggtctgttacaggttgatggaaggcggggcgcaaaaagagcaaattcgagagggattaccggccaaataggtctgagacttaagttcaggagaagtcattcaggtgtgaacgggacggcaagagatcggactgggacttagccaggtcatggcgagataattgagatgagtcgtggggtcattgttggctatccccttcatagccgaggcaaaaaggggatgaaccacttacttaaacatggcaataggctttgctgagataccaaaatcttcttttaactgctgtttgctcttcatgaccatctgaccatttgtgtcaattgtcatatgctgtgcttcgatattatggcgggcttgccacagcatcaccagttgcaggcagttctctttttgttcctcggtcaacgcaacgccatcaggccatttccccagttcaacggcggtcgacaaacgctggtatacctcaggcatcatgctgttgataatgtcatcaagattcataatttttccgctcctgtggaataagttgctgaatcgttttttcaaccgttgatttcttcgccgttttcgccatcggtaaagcgtaaagaggcagagttaacacaataacgttcgcccgttggctgcggcccgtcggggaagacatgccccagatgggcatcacagttaccgcaacgaatttctatgcgctgcattccatgtgacaagtctttgatataacgaatggattcttcacttaccggttcgtagaaactgggccagccacagccggaatcatactttgtttgggaatgaaacagcggggcatcgcagatcaaacagtgatatacgccgtcacgcttgttatgcagtaaacgacccgtaaatggcggctctgtcccatgattctgcgtcacgtaaaactgcatctcggacaaattttttttcagttcttctgccgaaggtttattagccatttgctcacatctcactttaatcgtgctcacattacgtgactgattctaacaaaacattaacaccaactggcaaaattttgtcctaaacttgatctcgacgaaatggctgcacctaaatcgtgatgaaaatcacatttttatcgtaattgccctttaaaattcggggcgccgaccccatgtggtctcaagcccaaaggaagagtgaggcgagtcagtcgcgtaatgcttaggcacaggattgatttgtcgcaatgattgacacgattccgcttgacgctgcgtaaggtttttgtaattttacaggcaaccttttattcactaacaaatagctggtggaatatatgactatcaaagtaggtatcaacggttttggccgtatcggtcgcattgttttccgtgctgctcagaaacgttctgacatcgagatcgttgcaatcaacgacctgttagacgctgattacatggcatacatgctgaaatatgactccactcacggccgtttcgacggtaccgttgaagtgaaagacggtcatctgatcgttaacggtaaaaaaatccgtgttaccgctgaacgtgatccggctaacctgaaatgggacgaagttggtgttgacgttgtcgctgaagcaactggtctgttcctgactgacgaaactgctcgtaaacacatcaccgctggtgcgaagaaagtggttatgactggtccgtctaaagacaacactccgatgttcgttaaaggcgctaacttcgacaaatatgctggccaggacatcgtttccaacgcttcctgcaccaccaactgcctggctccgctggctaaagttatcaacgataacttcggcatcatcgaaggtctgatgaccaccgttcacgctactaccgctactcagaaaaccgttgatggcccgtctcacaaagactggcgcggcggccgcggcgcttcccagaacatcatcccgtcctctaccggtgctgctaaagctgtaggtaaagtactgccagaactgaatggcaaactgactggtatggcgttccgcgttccgaccccgaacgtatctgtagttgacctgaccgttcgtctggaaaaagctgcaacttacgagcagatcaaagctgccgttaaagctgctgctgaaggcgaaatgaaaggcgttctgggctacaccgaagatgacgtagtatctaccgatttcaacggcgaagtttgcacttccgtgttcgatgctaaagctggtatcgctctgaacgacaacttcgtgaaactggtatcctggtacgacaacgaaaccggttactccaacaaagttctggacctgatcgctcacatctccaaataagttgagatgacactgtgatctaaaaagagcgacttcggtcgctcttttttttacctgataaaatgaagttaaaggactgcgtcatgattaagaaaatttttgcccttccggtcatcgaacaaatctcccctgtcctctcccgtcgtaaactggatgaactggacctcattgtggtcgatcatccccaggtaaaagcctcttttgcattacagggcgcacaccttctctcgtggaaacctgcgggtgaagaagaagttctgtggttgagcaacaacacaccgttcaaaaatggcatcgctattcgcggtggcgtaccggtttgctggccgtggtttggtccggcggcacaacaaggcctgcctgcgcacggttttgcccgcaacctgccgtggacgctgaaatcacatcgtgaagatgctaatggcgtagcgctgacttttgaattgacgcaaagcgaagagacgaaaaaattctggccgcacgactttacgctgttagcgcatttccgcgtgggtaaaacttgtgaaatcgatcttgaatcacatggcgaatttgaaaccacctctgccctgcatacctactttaacgtgggtgatatcgctaaggtaagcgtcagtgggctgggcgatcgcttcattgataaagtgaatgacgcgaaagaagatgtactgaccgatggtattcagaccttccctgaccgtaccgatcgcgtgtatctgaatccacaagattgcagcgtgattaatgatgaagcgctgaatcgtattatcgccgtaggccaccagcatcatctgaacgttgtcggctggaacccgggaccggcgctttcaattagcatgggcgatatgccggatgatggctacaaaacatttgtttgtgtagaaacggcttacgcttcagaaacgcaaaaagtgaccaaagagaaacctgcacatctggcgcaatccattcgcgttgcgaaacgttaatttacgttaatgttgtgtgccgggtgcgatgcatccggcacacaacatcacaccatatccagcgcagtttttccttttggtgccggatatgccttatccagcatagctaattccgctgaagaaagttcgacctcaagcacagccgcattttgttggacatgggcaatcgtggccgcttttggaatcgccatcacaccctgatgactgatcacccacgccaacaatacttgtgccgcgctgatattgtgagcatgtgcaatttcgttgactaccgcgttttttaacagtccattgcgcaaccgcccggcctgggctaacggactgtaagccatcaccggcatctgctgttgctggcaccaggggagtagatcgtactcaattcctcgtgaaccgagatggtaaagcacctgattagtggcacactgatttccccccggcagctgccagagttcctgcatatcagcataatcaaggttagaaacgccccagcggcggatttttccctgggcgatcaatttttccatcgctgcgacagtctcttcaaaagcgaaactgccagaccagtgtaataagtaaagatcgagataatcagtattgagacggcgtaaactggcttcgcatgcatttatcgctttttgcccgccagcattccacggatagactttagagacgagaaagaccttctctcgcagaccggttaatgcttccccaaccaccttttcggcaccgccatcggcatacatttcggcggtatcaatgagggttaaaccgagttcaatgcccgcgcgtagtgcagcaacttctgttttgcgctgactggcatcttcgctcatataccatgttccctgccctacggctggcagtgagacatcgccactaaattgaatcattttttgttgcattgtttcctcccaggtattgcaccaccgtaatgcaaaacagggcgtgacgccctgtttttatgcacaaaatgccctggaaagatgcattatcagaatttgtaggtgatcccggtagaaatcaggccagtccaggatttatccaccatcgggctgtcagtaacttcatcagacagacgggtgtagcgtgcggtaccgtaaacactccagtcgccgaggaagttgtagctggcgctcagctccaggtaagggctccagctgtcgttcgggttatagccacgcagaccgctgcgagcggactctttgcgcgatacgccataatagtattcgttctggttttcgctgttccactgcacaccaatacccggagtcacggtcaggccaccgttggtgtaacgatacaaccaggccatatcccagacgatgccgttgctgttatccagggtatcgccagccagggtggtacgcaggtaaccgtactgggtaaagtgagcataagacagaccagccatcatggtgctcttacggtcatccaggtgacgcatttggtgatcgccactgtctttcgctttgaagtaaagcggcgaccagtaagcggtaattgaaagtttatccgttgcgtcattccacaggtagtaaccaccacctaagccacggaaccagaagttatcgccttcatagttgattaccggtactgggtaaacatcggtatcgtaatctttatatgggtgttcaacgacacctacgcctgcgcccagggaaaatttaccttcagcgtgcgctacgcctgcagacgttgcgataagcactccaagtgccagaagtttgagtttggtcacaattaatcattccttaaacaaatgtttagcgggcgacaaagtttacccgtcaatacatcgaaacccaacctttttacgttttcattttttaaagtaactgtttaattttcctgacgcggatgacaccgcgcttacagccaaatgaatttagcgttactggcgagcctggtctttacattaattatgcaaaatttatggatgagttgttgatatgccattgaaattaagaaagccgtgcaggcaagttttccatttgccatctacgcttaattttgaaggtgtatcaccgggcacgttgttctcatcgtcgataaaatggcatgagagttgctgtgttttagcaagagacgtcgttcagtttacctcttccgggagcctctactattcatatgaacggctcttaacctgtgctaaaaaacgaaaggacggcataccatgaatatattcgatcactatcgccagcgatatgaagctgccaaggacgaagagttcacactgcaggagtttcttaccacttgtcggcaagatcgcagtgcttatgccaacgcggctgagcggctattgatggctatcggtgagcctgtcatggtcgatacagcccaggaacccagactttctcgactcttttctaaccgggtcattgcacgttatccggcgtttgaagagttttacggcatggaagacgcgattgaacagattgtctcttatctgaaacacgcggctcaggggctggaagagaagaaacaaatcctgtatctgctggggcctgtgggtgggggtaaatcatcgcttgctgagcgactgaaatcattaatgcagctcgtaccgatttatgtattgagcgccaacggtgagcgtagcccggtcaacgatcatccgttctgtcttttcaatccgcaggaagatgcgcagattctggaaaaagagtatggcattcctcgccgttatctcggcaccatcatgtcgccgtgggcggcaaaacgcctgcatgaatttggtggcgatatcactaagttccgggtagtgaaggtctggccgtcaattctgcaacaaattgctatcgccaaaacggaacccggcgatgagaacaaccaggacatctccgcgctggttgggaaagtcgatattcgtaaactcgaacactacgcgcagaatgacccggacgcctacggctattccggtgcgctgtgccgcgccaatcaggggatcatggaattcgttgagatgtttaaagcaccgattaaagtgctgcatcccttgttaaccgccactcaggaaggtaactacaacgggacggaaggtatctccgccctgccgttcaacgggattattctcgcacactcgaacgagtccgaatgggtcactttccgtaataacaaaaacaacgaagccttcctcgatcgtgtttacatcgtgaaggtgccgtattgcttgcgcatttccgaagagatcaaaatctacgagaaattgcttaatcacagtgaattgactcacgccccatgcgcccctggcacgctcgaaacactgtcacgtttttccattctttcgcgcctgaaagagccagaaaactccagcatttattcaaagatgcgggtttatgatggcgaaagtctgaaagacaccgatcccaaagccaagtcgtatcaggaatatcgtgactacgccggtgtcgatgaagggatgaacggtctgtcgacgcgttttgcgtttaagatcctctcccgcgtgttcaacttcgatcatgtagaagtggcagcaaacccggtccatctgttctacgtcctggaacagcagattgagcgcgagcagttcccacaagagcaggcagaacgctatctggagttcctgaaaggttatctgatcccgaaatatgccgagtttatcggcaaagagatccagacggcctaccttgaatcctattccgaatatgggcaaaacattttcgaccgttatgttacctacgcggatttctggattcaggatcaggagtatcgcgatccggataccgggcagctgtttgaccgcgagtctcttaacgccgagctggagaaaatcgagaaaccggcggggatcagtaatccaaaagatttccgcaacgagattgttaacttcgtactgcgcgccagagcgaataacagcggacgcaatccgaactggaccagctatgaaaaactgcgcacggtcatcgagaagaaaatgttctccaataccgaggagctgttgccggttatctcgtttaacgccaaaacgtcaaccgacgagcagaagaaacacgacgactttgtcgaccgtatgatggaaaaaggctacacccgtaaacaggtgcgtttactgtgcgaatggtatttgcgcgtacgtaaatcgtcttaacaaccctggcccggtacacatgttaccgggcctacaacgacagcgaaccgtgggcctgagaagcggcaacacaggcgtagcatacagttggcaaatgtagtacggggggcatatgacctggtttattgaccggcgtctgaacggcaaaaacaaaagcatggtgaatcgccagcgttttttacgccgttataaagcgcaaattaaacagtcgatctccgaggccattaataagcgttcggtgactgacgtcgacagcggcgaatccgtatccattcccacggaagatattagcgaaccgatgtttcatcaggggcgtggcggtctgcgccaccgcgtgcatccgggcaatgaccatttcgtccagaacgaccgaattgaacgtccccagggtggcggcggaggttccggcagtggtcagggccaggccagccaggatggtgaaggtcaggatgaatttgtctttcagatttcgaaagatgagtatcttgatctgctctttgaagatttggccttaccgaatctgaaacaaaaccaacaacgccagctgaccgaatataaaacgcatcgggcgggttataccgctaacggcgttccggccaatatcagcgttgtgcgttcattgcagaactcactggcgcgacgcacagccatgacggcaggcaagcggcgggaacttcatgcactggaagagaatttggccatcatcagcaacagtgaacctgcgcaactgctggaagaggaacgtctgcgcaaagaaattgcagaattacgtgccaaaattgaacgcgtcccttttattgacaccttcgatttacgttacaagaactacgagaagcggcccgatccctccagccaggcagtgatgttttgcctgatggacgtttccggttcaatggatcaatccactaaagatatggctaagcgtttttatattctgctgtatctgttcctcagcagaacgtataagaacgtggaagtcgtatacatccgccatcatacccaggcgaaagaagtcgatgaacatgagtttttctactcgcaggaaacaggcggcaccattgtttccagcgccctgaaactgatggatgaggtagtgaaagagcgttataacccggcacagtggaatatttacgctgcacaagcatcggacggcgataactgggccgatgactctccgctttgccatgaaatcctggcgaaaaaattattacctgttgttcgttattacagctatatcgaaattacccgtcgtgcacatcagacattgtggcgagaatatgagcatctgcaatctactttcgacaactttgcgatgcagcacatccgcgaccaggatgatatttatccggtgttccgtgaactgtttcataaacaaaatgcaacagctaaaggctaaaactatcagccaggtcattatcgcctggctgatttttagcttactgtaaattatctcatttattacatacattagcttacaatcgctttaaatatgacagcataacctttacataatttagttccagaaaacaatcattcggaaaaatgattcagtcaacacgtatttccatggggttattctttaaatattttttatcgttaacgaaaattgatcctggtcaaaactatatatctctgccatcaataaaatccagcactcacattgctctcctttttatggtttctatgggtacacaaaaattaaaagctcaaagcttttttattttcagtttattgctgacgttaattttattttgcattactaccttatataacgaaaacacaaatgtaaaactcatcccacagatgaattacctgatggttgttgtggctttgtttttccttaacgccgtcatttttcttttcatgttaatgaaatatttcactaacaaacaaattttaccaacactcattttaagccttgcatttttaagtggccttatctatttagttgaaaccattgtaattatccataaaccaattaacggcagtacactgatccagacaaagtcgaatgatgtttctattttctatattttccgccaactcagttttatttgtttaacctcgctggcgctcttttgttatggaaaagacaacatccttgacaacaataagaaaaaaacgggaatcctgttgctggcgctgatcccttttttagtttttccccttctggcacacaatctgagcagttataacgctgactattctttgtatgtcgtcgattactgtccggacaaccatactgcgacctggggaatcaactatacaaaaatattggtttgtctgtgggcatttttactgttctttattatcatgcgcacacgattagccagcgaactatggccgttaatagcattattatgtctggcatcgctatgctgcaacttacttctactgactctggatgagtataattatactatctggtatatcagtcgcgggattgaagtttccagtaaactgtttgttgtgtcttttctgatttataacatttttcaggagctgcaactctccagcaaactggcagttcatgatgtgctgaccaatatttataatcggcgctactttttcaacagcgtagagtcattattgtcgcgacctgttgttaaggacttctgtgtcatgctggttgatattaatcagttcaaacgcatcaatgcccaatggggacatcgtgtgggtgataaagtgctggtttcaattgtcgatattatccagcaaagcatccgccccgatgatattttagcgcgactggagggtgaggtgtttggcttgctatttaccgaactcaatagtgcccaggcaaaaatcattgcggaacgtatgcgtaaaaatgtcgaactcctgaccggctttagtaacagatatgatgttcctgaacaaatgaccatcagtattggcacggttttttcaacgggtgacacgcgtaatatctcgcttgtcatgacggaagcagataaagccttacgcgaagcgaaaagcgaggggggcaacaaagtgattattcatcatatttaagtgcaaaaatattcagagccatgctttttgcgtggcttttgcatacaatttattactattacccctaaatttcccctccccagcggcgcagagatgagtataattagcgcccctgtgccaggccgcaatcgaactttatctggttttctcgtttcactaaccgaaggagtgccatttatcatgaaattgcaccatagaatgctccggcattttatcgccgcaagtgtcattgtgctgacatcttccttccttatttttgaacttgtcgccagcgacagagcaatgagtgcctatctgcgctatatcgtgcagaaagcagactcctcctttctttatgataagtatcagaatcagagtattgccgcgcatgtgatgcgcgctctcgctgctgagcagtcggaagtgtcgccagaacagcggcgcgccatctgcgaggcttttgagtctgccaataacacccatggcttaaacctgactgcccataaatacccgggcttacgcggcacactacaaaccgcatccactgactgcgacacaattgtggaagctgcagcactattacccgcttttgatcaggcagtggaaggctaccgccaccaggatgattacggttcaggtcttgggatggccgaagagaaatttcactattatctcgatctcaatgaccgctatgtctatttttatgagccggttaatgttgaatactttgcgatgaataactggtccttcctgcagtcaggaagtattggcatcgatcgcaaagatattgaaaaggtatttaccgggcgtaccgtattgtcgagcatttaccaggatcagcgtactaaacagaacgtgatgagtttgctgacgccggtatatgtcgcagggcagctaaaagggattgtgctgctggatattaacaaaaacaatctgcggaatatcttttatactcatgaccgccctctcctctggcgttttctcaatgtcacgctaaccgataccgattcggggcgcgacattatcatcaaccagagcgaagataatctgttccagtatgtcagttacgtccatgacttaccgggcggcattcgtgtctcgttatccattgatattctttactttatcacgtcttcgtggaaaagcgttctgttctggattttgacggcgttaattttgctgaatatggtgcggatgcacttccgtttataccaaaatgtgtcgcgagaaaatattagtgatgcgatgactggactgtataatcgcaaaattttaacccctgaactggagcagcggttgcagaaactggtgcaatccggttcttcggtgatgtttattgctattgacatggacaagttaaagcaaataaatgacaccctcggtcatcaggagggggatttagcgattacgttattagctcaggcgattaaacagtcgattcgtaaaagtgattatgccatccgactcggtggcgatgaattctgcatcattcttgtcgattcgacgccgcaaattgcagcacaactgcctgaacgtatcgaaaaacgtctgcaacatatcgcgccgcagaaagagatcggcttctcttccggtatttacgcgatgaaagaaaacgatacgttacatgatgcgtataaagcttccgatgagcgtttatatgtcaataagcagaacaaaaacagccgttcatgataaccttctgtggttgtttgcttgtaatctcaggagcgtgaaatgactgaaatggctaaaggaagcgtgacgcatcagcggttaatcgctttattatcacaagaaggtgctgacttccgcgtcgttacccatgaagcggtaggtaaatgtgaagcggtgtcagaaattcgtggcaccgctctaggccagggtgctaaggcactggtatgtaaagtcaaaggcaatggcgtaaatcaacatgttctggcgatcctcgcagccgatcaacaggccgatctgagccaactcgccagccatataggcggattacgcgcttcgttggccagcccggcggaagtcgatgaactcacaggctgtgtcttcggcgcgatcccccctttcagcttccatccaaaactcaaactggttgccgaccctctactcttcgaacgatttgatgaaatcgccttcaatgcaggcatgctggataaatccgttattttgaaaaccgcggattatttgcgcattgcgcaaccagaactggtcaatttccgccgcactgcgtaactagccggtccgttcgataagaagaacggacaaaaccagtacaacagcaatggcaaaaaacgatgacgtgataatcagtgtctcgacaaacatttgatcgttcatagcatgcccccgggagatagctgttttcacgttattgttagcgtgcacaaatggcagtttgatgacagttcgcctgattttttatgcaaaaaacgtaaagattttctacttccttcctgcagcaagcgtaaagtaagcaggcttattattttttggcaaggaaaccacgatgtttgatgtcactttgctgatcctgctcgggttagctgcgctgggctttatcagtcataacaccactgtcgccgtttcaattctggtgttaatcattgtccgcgtcacaccgttaagcaccttttttccgtggattgaaaaacaggggctaagtatcgggataatcattctgacgattggcgttatggcccccatcgccagcgggacgctaccgccctcaaccttgattcactcgtttctgaactggaaatcactggtggcgattgcagtaggcgtgattgtctcctggctgggtgggcgcggcgtgacgttaatgggcagccagccgcaactggtcgccgggctgctggtaggcactgttttaggcgtagcgctgtttcgcggcgtaccggttgggccgcttattgccgcgggtctggtttcgctgattgtggggaaacagtagttaatctcgcaatatatcggcctggcgtttgccccaggcctttcttaaacatagtaataaaggccgttgttgaatcataccccagcgtatgagcaactttctgtacagtatcgcctttcactaatccctgaagcgccataatcagctgtaactgctgacgccactggcgaaaactcaaccccgtctcttttactatcagtcgggcaagattgcgttcactcatcgcaaaaaagccagcccattgccccaatgccccccactcgacaggccctttcgccatcatctccaccatcgtgcggattttaggatgagaagaaacgggcaggtgcagctgttgttgtggctgctgagggagttcatcaaacaggacctgaattaatctgcgggtcattggctcagcacgctgagtcgtcgtcctgtttgccagggttaaaattaattcccggcataagggcgatattttcaatgtgcaacatgttgtcggcattgtcactgcgctgggttcgataaacagaaaacagagttcagcattagctgttacttgattgctatgttccaccccgcccggtatccaaaccgcatattgtggcggcaccatccacaaagcattttccaccgtacaggtaattgcaccatgtagcgccagtatcagctgtcctttgcggtgctgatgtacaggactggttaactcatccgttccggcgtgaatacaaaatgcgaccgcggcttcatggtgtcggtcgggttcatagccattgagattcaacctgtgcatcattttgtccgaacttagcgataatttgtcattttagcttgattcaacataacaataaaaacggtaaggtacagcctcgtttgtaacaatgagaagcatatgacctgttcaacttcattaagcggcaaaaacaggattgtccttatcgctggcattctgatgattgccacaacattacgcgtcacctttaccggcgcagcaccgttactggatacgattcgttccgcttactcgctgacgacagcgcaaaccggcttattgaccaccctgccattattggcctttgcgctaatctcacctttggctgccccggtagcgcgacgttttggtatggaacgtagcctgtttgccgcgttacttttgatctgtgctggtatcgcaattcgctctctcccttcgccttacttattatttggcggtacagcggtcattggcggtgggattgcattaggcaatgtcttactgccaggattaattaaacgcgatttccctcattccgtcgccagacttaccggcgcatattccctgacaatgggagctgcagcggcactgggatcggctatggtcgtgccgctggctttgaacggttttggctggcaaggcgcgttgctcatgctgatgtgttttcctctgctggctctttttttatggctgccacagtggcgaagtcaacaacatgcaaatttgagtacctcgcgcgccttacatactcggggtatctggcgttcgccgcttgcctggcaggtcacattgtttcttgggatcaactcactggtctattacgtgattattggctggcttccggcgatcctcatcagtcacggctatagcgaagcacaggcgggttcactgcatggtttgctgcaactagccacagcagcacccggtttgctgatcccacttttcttacatcatgtgaaagatcagcgtggtattgcagcgttcgttgccttgatgtgcgcagtgggcgcggttgggctctgctttatgccagcgcacgcgatcacctggactctgcttttcggttttggttccggcgcaacaatgatactggggttgacgttcattggtctgcgggctagttctgcgcatcaggcggcggcactctcggggatggcacaatccgtcgggtatttgttggcagcctgtgggccgccgctgatgggtaaaatacacgatgctaacggtaactggtctgtaccacttatgggtgttgccatactttcactactgatggcgattttcggactttgcgccgggagagacaaagaaattcgctaatatccggtgctatagtgacgtaacaaatcatgcgtgaaagggagaacaaacacgatgaatattcagtgcaaacgcgtttatgatccggctgaacagagcgatggttatcgcatactggtcgaccgcctctggccgcgcggtatcaaaaaaaccgatttagcccttgatgagtgggataaagaaatcacgccgtcaacggaactgcgcaaagcctttcacggcgaagtcgtcgattatgcaacctttcgcgagcaatatcttgcagaactggcgcaacacgagcaagaaggaaagcggctggcggacatcgccaaaaaacagccgctgaccctgctctactcagcaaaaaacaccacgcagaaccatgcgctggtgctggccgactggctacgtagcttgtgattttagtacagcatccggcggttatttttcaccagccggatggtcacgccgccacaatgcccattcatcaatcgtttcaccgcccggtaatttgcaattgttgctgaccccttgcgctgtctgcactggaatgagcgtcccgcccttctgctggcaatagaccgacgccggatttgccataccaatctgcggcggtttaggtgcttctggctgagaaggggttgaacaaccagccaggaccagcaagcaaggcagaacaaaactgataattttcatttattgatctcacatatttatccaagattagagtatcgcggtatcgttttgttttgcagcactatttttattacattcactcaaaacatattacgtcttgtttcatctttgttgatgatgttttatcatgcctgcaaagattaaataatcagcatttacccgccgtatcctggagttgttccgtgtcagatcagattatcgcccgcgtctcgcaatcccttgccaaagaacagtcactggaaagtctggtccgacagcttctggagatgctggaaatggtcactgatatggaatcaacctacctgaccaaagtggatgtcgaagcgcgcctgcagcatattatgtttgcccgtaacagccagaaaatgtacatcccggagaattttaccgtctcgtgggattactcgttatgcaaacgcgccattgatgaaaactgctttttcagcgatgaagtccccgaccgttggggtgactgtattgcggcacgcaatcttggcatcaccacatttctgagcacgccaattcacttaccggatggatcattctatggcacgctttgcgccgccagcagtgagaagcgccagtggagtgaacgcgcggaacaggttttacagttattcgccggactgattgcacaatatattcaaaaagaggcactggttgaacagctgcgcgaagccaatgctgcgctgattgcgcaatcgtataccgactcgttaaccgggctaccgaatcggcgggcgatttttgaaaatctgacgacactgttttccctcgcccggcatcttaaccataagataatgatcgcgtttatcgatctggataacttcaaattaatcaatgatcgttttggtcataatagtggcgatctgtttctcattcaggttggcgagcgccttaatacgctccagcaaaatggcgaagttattggtcgtctcggcggtgatgagtttttagttgtttcactaaacaacgagaatgcggatatttcgtcgctgcgagaacgcattcagcagcaaatacgtggagaatatcacttaggtgatgttgatttgtattatcccggtgccagtcttggcatagtagaagtcgatcctgaaacaaccgatgcagacagtgccctgcatgctgccgatattgcgatgtatcaggagaaaaaacacaaacagaaaacaccttttgtcgcgcatccagcgctacattcctgaggcgtattcacatccttttgattggtgataacatgcgaatcggtattatttttccggttgtaatcttcattacagcggtcgtatttttagcatggttttttattggcggctatgctgccccgggagcataaagatgaaaaaaacaacgattattatgatgggtgtggcgattattgtcgtactcggcactgagctgggatggtggtaacgtcacctctaaaaaatagcaaaggctgcctgtgtgcagcctttgtgcaatttaagcgttaacttttaatcttcctgtagataaatagcacgacaatcgcaccaataacggcaaccacgaagctgccaaaattgaagccatcgactttaccaaagccaaacagcgtgctgatccatccgccgactacggcaccgactatccccagcaggatagtcataaagaatccacctccatctttacctggcatgatccacttcgccagaataccggcaataagcccaaaaataatccatgacagaatgcccattgtttcctcacttatctgttttgcattagcgggttagtcgctgataaaaagcatagcacaacatcgggagggcaagatttgtgacgagcatcacggaggttttttttgcgatggcgcagaaattgcgccatcaacgatcagtgataattaccaaccacaaacatcatgttcgttttccgtgtcataagaacgtacggtattcaccagatcttttatcacttcagccgccacttctggcaccagcaaagtcatcggcgtctctgtttcataatcgacagaaacgccattgctgttattggtgacggtcacggtatacgttgctttgcccatgattcatttcccgttatgaatgactttccgttgttgcgcaccttccatcaggacttcaggagccacgaagaagtcaatgttgaaataagtatcgtcagtcatggcttcaatgttgtgccacttttctggagggaacaccgcaaactgccccgcttcgataaggatcacctgatcaggctctgcactgtgttcatcagcgtagccgagatatttgaccgccccatgcataacggaaaggcgtgggtaaacccccgggcgcgttcctttatcaagatgacgttcgaatattccggcaggtgcagtttgtttattccagaaaggcgttgagcgcgtatgaatataattctgtgggatttgaagcatccttttccctccttcggtgaatgcgctgaaaacggtttattccagccgtttcagggtacgcctgataatttgcattttaaataccatttattggttactttttagcaccatatcagcgaagaatcagggaggattatagatgggaagcccgcgacaacgcgggctgaaagcatcaggattgcagcgtcgccagtcgggcagcgaaacccacgaacatcaaaccaatcagtgagttgccaactttagccagtttctttttggtacgtatgtactgcgtgacaaaagcaccagatataatcaggaagctcaaatagcagaaactcaccagttccagcgtcgccgccagaataaagaatgaaattcccgtatgtggggcattaacatcgataaactgtacgaaaaacgacacatagaacaaaatggctttcggattagtcaggctcaaaattaacgcgcgtttaaaaatagcaccgtattggggctcatcggatttggcctcgctatttttacccttcagggtcgcgtaaagaattttactccccagatagagcaaataaaacgcaccaagataacgtacaatgttgaataatatcggggtggtcttaattaatgtcgccactccagcccatgccagaaacatcaataccgcatcgccaataaatacaccgcaggccgcaagataaccgcctttcataccgctactgacgctatttttgagtacaaacagggtatttggccctggcaccaacacaataaaaatggccccaaccagataggtccagtaattcagaaccccgtattcagcgaacacattaacctctttaattatctttcgatcatgcgcgattaaaggtgaatatgctaaccaatctgtagcggcttagaaaggagaaaatcaggttttaacctgatatcaacccgataattgaatcattaatcaggcatgctccagtgaaaaattcgggtagtgctcggcaaaatactggcgtaaaaattctaccgttatccgcactttcgctgacgtcgccagccttgaaacataaacggcccagacgttcgctggctggtaatattccggtagcacttgcactaaatgaccactggcaatgttttcgctaacatcccaccaggaacgcagagcaatcccctgcccatcgagacaccactgatggacaatttctccatgattagacgacagtgggccggtgactttaatcgcatgggggccttctttattgcgtaattgccagacaccaaaaggatgatcgcgctctttaatgaccaggcacggcaatgcagaaagatcggttaaatgtttcggcgcgccatgttgcgcaataaattccggcgacgcgcagagaatacggtaattggtcgccagtttgcgggcgattaaattaggggcgatgtcatcgccaatgcgaatatcgagatcgacaccttcattgaccaaatcgaccagtcggtcttccacatcaaaacgtaattccagttgcggatacgccttcgccagcgctgataacgccggagccaccacctgtcgtccaaaaccaaagctgctgataatacgcagcatcccctgcggcacctgacgcacgtcagaaagttcgtccatcatctgaccgacatcctgcaaaatccgctgcgcccattcataaatccgctctccttcttcggtaatggtgacgcggcgggtggtgcggtgtaacaacaccacgtttagcgtttgctccagcaaggcgatgcgcttgctgacgaacgccggtgaaacgcccagttcttccgccacggcggcaaaaccagcccggcgagccaccagcataaagacgcgcaaatcattcagcagcggtaaattattcatgattcgtgttttatgtttcaccagttacggggattaattccttttcagtcaattataggatggtgatgttgtcaattttgatggtcaggaagtgagaacccaatgatgaaaacgatgcgtattgctgcgatcccgggagacgggattggcaaagaagtccttcctgaagggattcgcgtgttacaggctgccgctgagcgctggggcttcgccttgagttttgagcaaatggagtgggcgagctgcgagtattacagccatcacggtaaaatgatgccggacgactggcatgagcaacttagccgtttcgacgccatctattttggtgccgtcggctggccggataccgttccggaccatatttcgttgtggggttcgctgctgaaatttcgtcgtgaattcgaccagtacgtcaacctgcgcccggttcgtctctttcctggcgttccctgcccgctggcgggaaaacagcctggcgacatcgatttttacgtggtcagggaaaacaccgaaggcgaatattcctcgctcggcggtagagtgaatgaaggtacagagcatgaagtcgtcattcaggaatcggtatttacccgccgtggtgtcgatcgcattttgcgttatgccttcgaacttgcgcaaagccgtccacgtaagacactaacttctgccactaaatcgaacggtttagccatcagcatgccgtactgggatgagcgagtggaagcaatggccgagaattacccggagatccgctgggacaagcagcatattgatattctctgcgcgcgttttgtgatgcagccggaacgattcgatgtggtggtggcgtccaatttgtttggcgatatcctttccgatcttggcccggcctgcaccggcaccattggcattgccccatccgccaacctgaatccggaacgcactttcccgtcgctcttcgagcctgtccacggttccgcgccggatatctacgggaaaaatattgctaaccctatcgccacgatttgggccggggcaatgatgctcgattttctcggcaatggcgatgagcgtttccagcaagcgcataacggtattctggcagcaattgaagaagtgattgctcacgggccgaaaacacctgatatgaaaggcaatgccaccacgccacaggttgccgacgcgatttgcaaaattattttgcgttaaggtcaaaccagtttatttgaaccgcgtcactgacgcggtttttttattcgttctttgcagtaaataacctgcgtcatttcaccttttattgtttccgtttcgtgttttatggctttccgtattcttaattgtttaatttatgtaacatgcaaattttgttacgcgtacgttaggttccgccgtacaggtattggttttgctggcaatgggactggtgatttatttagccaccagtaaatacggcaatattcgtcttggcgaaggaaaaacggaatacagcacgctctcctggctgtttatgtttatttgtgccggtttaggttcttctacgctttattggggggttgctgaatgggcctattattatcaaacacctggattaaatatcgcaccgcgttcacaacaggcactcgaatttagcgttccctactctttcttccactggggcatcagcgcctgggcaacttatacgctggcctcattaatcatggcttatcactttcatgtgcggaaaaacaaaggtctgagcctttccggcgttattgctgctattaccggcgttcgcccgcaaggcccatggggaaaactggtcgatttgatgttcctgatcgccactgtcggcgcactgaccatttcccttgttgttaccgcagcaacctttacccgtgggctttccgcgctgaccggtttacccgataacttcaccgtgcaggcatttgtgatcctgctttccggcggcattttttgcctaagctcgtggattggtatcaacaacggtttgcaacgtctgagcaaaatggttggctggggcgcgttcctgctgccattactggtgctgattgtcggcccaaccgaatttattaccaacagcatcatcaatgccatcggcctgaccacgcaaaacttcctgcaaatgagcttattcaccgatccgcttggcgatggttcatttacccgcaactggaccgttttctactggctgtggtggatctcatacacccctggcgtagcaatgtttgtcacccgcgtttcccgcggtcgtaagattaaagaagttatctggggactgatcctcggcagcaccgtcggttgctggttcttctttggcgtaatggaaagctatgccattcatcagtttatcaatggcgtaatcaacgtcccacaggtgctggaaacactgggcggcgaaacagctgtacagcaagttctgatgtcgttgccagccggtaaattgttcctcgccgcatacctgggcgtgatgattattttccttgcctcgcatatggatgcagtggcctacaccatggcggcgaccagtacgcgtaatctccaggaaggtgacgatcctgaccgtgggctgcgtcttttctggtgcgtggtgatcactctgatcccgctttccatcttgtttaccggtgcttcgctggaaacgatgaaaaccaccgtcgtgctcacagcccttcccttcctcgtcattttactggtgaaagtcggcgggtttattcgctggctgaaacaggattacgccgacattccggctcatcaagttgaacattatctcccgcagacaccggttgaagccctggaaaaaacgccagtgctccctgcgggaaccgtattcaaaggcgacaactgagcgccatcatcctaacgataaaggtatccctatgagcaatctgagccctgactttgtactacccgaaaatttttgcgctaacccgcaagaggcgtggaccattcctgcccgtttttataccgatcagaacgcgtttgaacacgaaaaagagaacgtcttcgccaaaagctggatttgcgtcgctcacagcagcgaactggcgaatgccaatgattatgtgacgcgtgagatcattggcgaaagcatcgtgctggtacgcggtcgtgataaggttttgcgcgcgttctataacgtgtgtccgcaccgtggtcatcagttgttgagcggtgaaggaaaagcaaaaaatgtgattacctgcccgtatcacgcatgggcattcaaactcgatggcaacctggcccatgcacgtaactgcgaaaacgtcgccaatttcgatagcgacaaagcgcaactggttccggtgcgtctggaagaatatgccggattcgtcttcatcaacatggaccccaacgccaccagcgtagaagatcaattacccggcctgggcgcgaaagtgctggaagcctgcccggaagtccacgatctgaaactggcggcccgctttaccacccgcacgcctgccaactggaagaacattgtcgataactatctcgagtgctatcactgtggtccggcgcatccaggtttctccgactccgtacaggttgatcgttactggcacaccatgcacggtaactggacgctgcaatacggtttcgccaaaccgtccgaacagtcgtttaaatttgaagagggtacggatgcggcattccacggtttctggctgtggccgtgcacgatgctgaacgtcaccccgatcaaagggatgatgacggtcatttatgaattcccggtggattctgaaactaccctgcaaaactacgatatttacttcaccaatgaagagttaaccgacgagcaaaaatcgctgattgagtggtatcgcgatgtgttccgtccggaagatttacgtctggttgaaagcgtacagaaagggctgaaatcgcgtggctatcgtggtcaggggcgcatcatggccgacagtagcggtagtggcatttccgaacatggtatcgcccatttccataatctgctggcgcaggtgtttaaggactaatgacatcggcggcggtattttccgccgctgggctgatttttgatggagtacagcaatgtcagactatcaaatgtttgaagtacaggtgagccaggttgaaccccttaccgaacaggtgaaacgcttcacgctggtggcaaccgatggcaaaccattacctgcgtttaccggaggaagtcacgtcattgtgcagatgagcgatggtgataaccagtacagcaatgcgtattcactactgagttcgccgcatgacacctcttgttatcagattgccgttcggctggaggaaaactcgcgcggcggttcccgctttttgcatcagcaggtaaaagtgggcgatcggttaacgatttcaacgcctaataacctgtttgcgctaattccctcagccagaaagcatctgtttatcgcgggcggtattggtatcacccctttcctgtcgcacatggcagagctgcaacacagcgacgtcgactggcagctacattactgctcgcgaaatccagacagttgcgcatttcgtgatgagctagtccagcatccgcaggctgagaaagtccatttgcatcattcatcaaccggaacacgactggaattagcgcgattattggcggatatcgaacctggcacacacgtttatacctgtggccccgaggcgctaattgaagcggtaagaagtgaagctgcgcgtctggacatcgccgccgatacgctgcactttgagcaatttgctatcgaagacaaaaccggcgatgcatttaccctggtgcttgcccgttccggaaaagagtttgtggtgccggaagagatgactattttgcaggttattgaaaataataaagccgcgaaagtggaatgtttatgtcgtgaaggggtatgcggaacctgcgaaacagcaatactggaaggtgaagctgaccatcgggatcaatattttagcgatgaagagcgtgccagccagcaaagtatgttgatctgttgttcgcgtgcgaagggtaaacgcctggtgttggatttgtagtttgccgaagccggatgtggcgctgagcgcgcccagtccggcttcggaagattttactgcggatattcctgcaataaattgtgtaatgcttccgccatcagctcaccacgccagccggaaatcagctccggcaaattgttctgcggtttcagtttccagtgccagttcagcagttggttgatttgccgacgcgatgccagcaattcggcgctgatcttatgcgtttcgctcacgtcagtaatcagcgacttaatcgctttaaacgctttacgataacccggcatgtccatcaggttaagcatcggctgcggtaaggcatcttccggcaatgtctgcgctttttccaccagcgctagcagcgttttaccgtgaaagcggatttcgctaccggataaacccaggctgtccagttcgcctaaacttcccggcatataacgcgctaccgaccacaaatgctcttcacgcacgacaaagttcaccgccagatcgcgctctcgcgccttgcgcagtcgccagtcggctaacagttgcagacaggccagttggcgtgtgcgtaattgccaggcattggtgatatcacgccaggcatcttccggcgcaacgacttcctgacgacgcatttgcatcaggcggcattcatccagcgccgcaggtagccagccggaggcctccgtttctaccataagcttggcggtgatcggtaacagataccagacatccgccgctgcgtattcacactgacgttcggtcagcggtctggccagccagtcggtgcgcgattcactcttgtccagcgtaacgccggaatactcttccaccatggaagcgaaaccccatgacatcgggcgtccgcagaaggcagcaaggatttgcgtgtcaatcaagggttgtggtaattcgccaaagacattgaggaacacttccagatcttcactgcctgcatggagaaattttgtgatggacggatcgcgcaggatcgctttcagcggtgaccagtcggtgatcccgagtggatcgattagcgccagatgctcgccatcgaaaagttgaatcaaccccagctgcgggtaataagtgcgcgtacgaacaaattcagtatccagggctatcgccggaaaggcacggacggcttcacacaaagaagccagcgcatcgtccgtggtaatcatttggtaattcaaattgttttctctttagtgggcgtcaaaaaaaacgccggattaaccggcgtctgacgactgacttaacgctcaggctttattgtccactttgccgcgcgcttcgtcacgtaattctcgtcgcaaaatttttccgacgttagatttcggtaactcatcacgaaactccaccagcttcggtactttgtatcccgtgagctgacggcggcaaaaagtcaccagtgactcttcggtaagcgatggatcttttttcactacgaagattttcaccgcttcaccactggagccggaaggtacgccaacagccgcgacttcctgtacgccaggatgctgcatgacgacatcttcaatctcgttgggatagacgttaaaaccggaaaccagaatcatgtcttttttacgatcgacaatgcgcaggaatccttcttcatccattaccgcgatgtcgccggtgtgtaaccagccatttttgatgatttcatcggtagcatcgggacgctgccagtaacccagcatcacctgcggtcctttgacacaaagctcacccggttgacctggtggtacttcattatcatcatcatccaccagtttggcttccgtcgacggcaccggcaaaccgatgctaccactatgataatcaatatcatatgggttaacgctgaccagcggcgcacactcggtaaggccatagccttccagcagatactgtccggtcagtttcacccaacgctctgccaccacttgctgcactggcatcccaccgcctgcggaaagatgcagactggagaaatccagctgctggaactctttattgttcagcaacgcattgaacaaggtgttaacgcccgtgatagcggtaaacggatatttcgctaactcttttaccaaccctggaatatcgcgcgggttagtgataagcaggttctgcccacccagttcgataaacagcaggcagttaatggtcagggcaaaaatgtgatacagcggcagcgccgtcaccaccagctctttgcccggatgcaacagcggaccataggtcgcgttaacctgttccaggttcgccagcatattgcggtgagtcagcatcgcgcctttcgccacaccagtggtgccgccggtgtattgcagaaaagctaaatcttccggcaccagttcgggtttgacgtactgcatccggtagccgttatgcagtgcgctacgaaatgaaatggcatctggcagatggtatttcggcaccaaacgcttgatgtatttaacaacgaaattgactaccgtgccttttgccgtagatagctgatcgcccatacgggtcagaattacgtgctgaacggcggttttatcaaccactttttccagtgtgtgagcaaagttagacacgataacaatcgccgatgcgccgctatcgttaagctgatgctcaagctcacgcggggtatacaacgggttaacgtttacgacgatcatcccggcacgcaaaatgccaaacagcgccaccggatattgcaataaattaggcatcatcaacgcaacgcgatcgcctttcttcagccccaacccttgttgcaaataagcggcaaacgcgcgactgcgttcttccagcttgcggaaggtcattacctcccccatattcacaaacgcaggttgatcggcgtagcgcgcgaccgactgctcaaacatatctaccagagattgataacggtcagggttgatctccgtcggaacgtccgcgggataacggttaagccaaaccttcttcaattcttcacctctaaaatgcgtgttcgtcgtcatcgcaaccccaaatgatatacatgccgttaacataatattaactcatcataccagcttgataattacccaacgaaaaggttgcgaagcgcgtcactatttatttttatctttaccgtaagaatgcagaaacagcggaccagccgctgtttctttttctttaaaaacaagcaattattcagttacaactgtttgtactctcgcggggccgggattataccagccccatccgccgtagccatagggccagccacgaccgccataaaaccatggatcaatcggctgaggcggcataatcacctgctgggttaaatgccaacgtttgtaacccgttacttgcatcaccataaatttatagggcgtattgccgattttgccgtcaaccgcaccagtgattggcccgactaccgtaaccagttgtccacggaaatccaccgggtccagaaaaccgttcacatcggcataaatgcgaccgcgagaaggttctcccagcgtcggtctggctccgctgtccagcggtacggtagcaatttccaggcgagttttcccttgctggttttgtaccgcaaccactttgccaccaaagcgtgcctcctgaccaacgtacagctgcggcgcactcatcacccgaactaaatcttgttgcggcgtgggactgctgcctttaatggcgtccggcacagtgacacaaccgctcagcattagcgcaaacgtacctgccagtatgcctttgataacattcttttgaaccgccatggtgcgactcctttttttctcagggcatactcttaagattcattctttgcccggaagtttcttccatgcgacgttgttacgtaaataaaccggttcggcatgttccaccgccaccgttttaccctcagcaaacatctgacacgcaatcggcagcatatcttcagcagcaggcagtaacacttcgccatcgcgcaaaaccagcccgctctctttaccgagatccggccaagcttgccagcccgtccctaccgtcacccattcgccggaaagctgttgcattcgttcatggacgatttcgggtttgagtacggcttcggtttcttcaccgtgccagataccgttttcatcacgctgatattcggcccagtaaacttcgcccattcgcgcgtcaatggctgccagcacgcgggttgcgccgtttttgcgccacgccccttgcgccatcgtcattagcgtggagacgccaatcatcggtaattccgcgccaagcgccagcccttgcgcgatgccaataccaatgcgcacgccagtaaagctaccggggccgcgcccgtaagccagagcgttaatatcagtcagggaagttccgctggtggtcaggatatcctgcaccatcggtaagattcgttgagtatgttcacgagggcaaagctcaaaatgagcgttgacagtaccgtcgttccacagggcgacagagcaggcctctgtcgcggtatcgatagccagaattcgcatgggtcttcgtgcttagatcaataaaaaggcgcgcatcataccatactccgtaacaaattacctggaggatggtatcgcaaggaaacgaaccgcacgggcaatgtcacgggtgcgtggcgcgggcggcagactggcgagaaacgtcgcgccgtaaggacgcatcaccagccgattgtcacaaatcaccagcacgccacgatcgtcggcgtcgcgaatcagtcgccctaccccctgtttgagagtaatgacggcatctggtagttgcacttcatcgaacgggtcgccaccgcgcaaacgacaatcttccatgcgcgcttttaacagtggatcatccggcgaggtaaacggcaatttgtcgataattaccaatgacaatgtatcgccacgcacgtccaccccttcccagaaactgctggttgccacaagaagcgcattaccggcgctgacaaattgctgcaacagttgccctttgctggtttccccctgcaacaatacaggaagcgtcatggtagcgcggaactgctcggccagatcgcgcatcatggcgtgcgaggtacaaagcataaaacaacgaccgttgttagcttcgatgatcggtcgcagcattgccgctaactggcgagcagaacctggctggttggtttgcggcagattgcgcggcacacagagtaacgcctggcggctgtaatcaaatgggctgggcaacagcaacgactcggcctgttcgatgccaagccgcgaggtgaaatgatgcagatcgtcgttcaccgacagcgttgctgaggtgaagatccagctaccgggtttttgcgccattaactctttgaatttatccgccacgctgagcggcgtgagagccagagtaaaatggcgcgaagtgcattcgtaccagtagctgtagcccggctgattgatctcttttagccgcttcagccgtgtgcgatacaacgtggcgcgctcaaatgccgcatccagcaaggcggaacgccccagtgacagtttcgccacgtcataacaaagttccagggtgtcatcgagcagtaaaaatgcccgctgaatttgcggattagctaacagctcacgcaggttaccgcgataacctggctcaccgagttgcagacgaaaatcctgcgcactctgggcaagacgatcagcgcacttttgtaactgctgggtgtcttttaattcggtgcggtaggcgatggtgatgtcttttgccaggtcgagcagttgtcgactggagagtgactgaccaaaatactggctggcaatgtccggtagctggtgggcttcgtcgaagatcatgacgtccgcttccgggatcagttcgccaaatccactctctttaaccaccatatccgccagaaagagatgatggtttaccaccaccacatcggcgtccatcgcttttttacgtgctttgaccacaaagcaatctttatacatcgggcagtcgctgccaagacagttgtcgttggtgctggtgaccagcggccacgcctgtgaatcttccgccacgctgacgcaggtgctgatatcaccatcgactgtttgattagaccaggagcgcagcaggatcacatcgcttaagatttgtaccggcagatcgccccccgccagcgcctgctgttcgagacgttcgaggcagaggtagtttgagcgccctttcagcagcgccacgttgcccgtatatttcaatgcctttgagactgttggcaaatcgcggctgtagagctgatcctgcaacgcttttgagccggtcgagataatgactttctttttcgcccgcagcgcaggagccaggtaagcgtaggttttgcccgtaccggttcctgcttccaccaccagcggctggcctttttctatcgcctgggtgacggctaccgccatctgtcgctgtggttctcgcggcttaaagcctggtatcgctttcgccagctgaccgtctggtgcaaaatcgtccgtcacactaccccctgttgatttgaacagggattatgtcaggatgagggcgctttcgccagttgaagtggtgacggcgacctcacattgtggcagtctttgcagcacgaaaatggaagtataatgaggacaaaatgatgactatcgttcgtatcgatgctgaagcccgctggtctgatgtagtaatccacaacaacacgctctactacactggtgtaccggaaaacctcgacgccgatgcctttgagcaaaccgccaacacgctggcacagattgacgccgtgctggaaaaacagggcagcaataaatcgagcattctggatgccaccattttcctggccgataaaaacgacttcgcggcgatgaataaagcgtgggatgcctgggttgtcgcgggtcatgcgccggtgcgctgcacggtacaagcgggtttgatgaacccgaagtataaagttgaaattaagattgtggctgcggtgtaagctttatcgaagcaaaataagtcagacgataatttatcgataatactggtcggttttacataaatcgaccagagaataagatattactgttgatgcttctgctaattcattatttatatttataatttcaattttatctataaaactaactatataaataaacataaacatgccgttgtgttcgccctttgattagcaactctggttttctttcttagctgaacaatctggttatagcgtgcggactgaccgttaaatttctccatcttactggataacacaccatgagctgctacctttaaaacacctgaatgtcaacaggttaactcgtgccatatcgttataatccctttgatattagatgcaaattaaggtcatatatagccttatcgataacatggttaattttaaggataagaatatgcctgctgtaatagataaagccctggatttcattggtgccatggatgtatcagcgccaacaccaagttcgatgaatgaaagcacggcgaagggaatctttaaatatttaaaagaactgggagtacccgcgagtgccgctgatattacggcgcgagctgaccaggaaggctggaaccctgggttcacggaaaaaatggttggatgggcaaaaaaaatggagacaggtgaacgttctgtgattaaaaatcctgaatacttttcaacatatatgcaggaagaactaaaagcactggtctgagttaaatttatatcagcataaatgggtcaggacgcttttaatcacatataaaaagcgtcctttttctcacaatcaaatgatcatcggcttctataacgaaatcgatacggattagtgtgttactcgtcttcatcctcaaaacgcgccacgattcgctcgccggagtggttggcacgcagctcttctgccaccagcgcgattgcctggccgctgctcatcccttgtgccatcagttcctggatccgctcgacagctttttgctgctgttcatgggtgagtgaaggtaaacctgcaaacattgttaactcctgctaaattgttggcgctaattatttcatgctacccggcacatagccagtagagtcaggactgatgaagacgttatctcccgctgtgattactttaccctggcgtcaggacgccgctgaattttatttctcccgcttaagccacctgccgtgggcgatgcttttacactccggctatgccgatcatccgtatagccgctttgatattgtggtcgccgagccgatttgcactttaaccactttcggtaaagaaaccgttgttagtgaaagcgaaaaacgcacaacgaccactgatgacccgctacaggtgctccagcaggtgctggatcgcgcagacattcgcccaacgcataacgaagatttgccatttcagggcggcgcactggggttgtttggctacgatctgggccgccgttttgagtcactgccagaaattgcggaacaagatatcgttctgccggatatggcagtgggtatctacgattgggcgctcattgtcgaccaccagcgtcatacagtttctttgctgagtcataatgatgtcaatgcccgtcgggcctggctggaaagccagcaattctcgccgcaggaagatttcacgctcacttccgactggcaatccaatatgacccgcgagcagtacggcgaaaaatttcgccaggtacaggaatatctgcacagcggtgattgctatcaggtgaatctcgcccaacgttttcatgcgacctattctggcgatgaatggcaggcattccttcagcttaatcaggccaaccgcgcgccatttagcgcttttttacgtcttgaacagggtgcaattttaagcctttcgccagagcggtttattctttgtgataatagtgaaatccagacccgcccgattaaaggcacgctaccacgcctgcccgatcctcaggaagatagcaaacaagcagtaaaactggcgaactcagcgaaagatcgtgccgaaaatctgatgattgtcgatttaatgcgtaatgatatcggtcgtgttgccgtagcaggttcggtaaaagtaccagagctgttcgtggtggaacccttccctgccgtgcatcatctggtcagcaccataacggcgcaactaccagaacagttacacgccagcgatctgctgcgcgcagcttttcctggtggctcaataaccggggctccgaaagtacgggctatggaaattatcgacgaactggaaccgcagcgacgcaatgcctggtgcggcagcattggctatttgagcttttgcggcaacatggataccagtattactatccgcacgctgactgccattaacggacaaattttctgctctgcgggcggtggaattgtcgccgatagccaggaagaagcggaatatcaggaaacttttgataaagttaatcgtatcctgaagcaactggagaagtaagacgtggaataccgtagcctgacgcttgatgattttttatcgcgctttcaacttttgcgcccgcaaattaaccgggaaaccctaaatcatcgtcaggctgctgtgttaatccccatcgtccgtcgaccgcaaccggggttgttgctgactcagcgttcgattcatctgcgtaaacacgctggacaagtggcattccctggaggtgcagtcgatgacacggacgcatcagctatcgccgccgcgctgcgcgaagctgaagaagaggtcgctataccgccttccgccgttgaagttatcggcgtgctgccgcccgtcgatagcgtcactggctaccaggtaaccccagtggtcggcattatcccgcccgatctgccgtatcgcgccagtgaagatgaagtctcggcgatgtttgaaatgccgctcgcccaggcattacatctgggtcgttatcaccctttagatatctaccgccgtggtgattcacatcgggtatggctgtcctggtacgaacagtattttgtatggggaatgaccgcaggcataattcgtgagctggcgctgcaaattggtgtgaaaccctgactatacttatctttacatctacaaaacactacttgagacaatcatcgcaatattagttaaatcgcggtttttgattagtttaattcatgtgaatagttaagccagtcgccgcgttccctcttacactatgcgctgttattagttcgttactggaagtccagtcaccttgtcaggagtattatcgtgattagtctattcgacatgtttaaggtggggattggtccctcatcttcccataccgtagggcctatgaaggcaggtaaacagttcgtcgatgatctggtcgaaaaaggcttactggatagcgttactcgcgttgccgtggacgtttatggttcactggcgctgacgggtaaaggccaccacaccgatatcgccattattatgggtcttgcaggtaacgaacctgccaccgtggatatcgacagtattcccggttttattcgcgacgtagaagagcgcgaacgtctgctgctggcacagggacggcatgaagtggatttcccgcgcgacaacgggatgcgttttcataacggcaacctgccgctgcatgaaaacggtatgcaaatccacgcctataacggcgatgaagtcgtctacagcaaaacttattattccatcggcggcggttttatcgtcgatgaagaacactttggtcaggatgctgccaacgaagtaagcgtgccgtatccgttcaaatctgccaccgaactgctcgcgtactgtaatgaaaccggctattcgctgtctggtctcgctatgcagaacgaactggcgctgcacagcaagaaagagatcgacgagtatttcgcgcatgtctggcaaaccatgcaggcatgtatcgatcgcgggatgaacaccgaaggtgtactgccaggcccgctgcgcgtgccacgtcgtgcgtctgccctgcgccggatgctggtttccagcgataaactgtctaacgatccgatgaatgtcattgactgggtaaacatgtttgcgctggcagttaacgaagaaaacgccgccggtggtcgtgtggtaactgcgccaaccaacggtgcctgcggtatcgttccggcagtgctggcttactatgaccactttattgaatcggtcagcccggacatctatacccgttactttatggcagcgggcgcgattggtgcattgtataaaatgaacgcctctatttccggtgcggaagttggttgccagggcgaagtgggtgttgcctgttcaatggctgctgcgggtcttgcagaactgctgggcggtagcccggaacaggtttgcgtggcggcggaaattggcatggaacacaaccttggtttaacctgcgacccggttgcagggcaggttcaggtgccgtgcattgagcgtaatgccattgcctctgtgaaggcgattaacgccgcgcggatggctctgcgccgcaccagtgcaccgcgcgtctcgctggataaggtcatcgaaacgatgtacgaaaccggtaaggacatgaacgccaaataccgcgaaacctcacgcggtggtctggcaatcaaagtccagtgtgactaatacttcttactcgcccatctgcaacggatgggcgaatttatacccgctttctcgtctgctgtaatattccccactacacttccactgttgcgtcaggcgtttgtcgccatacgcttacagggtggcccgcatgcaaaaagcacaacggatcattaaaacctatcgtcgtaatcgaatgattgtttgtacgatttgcgcactcgttacgctcgcttcgaccctgagcgtgcgatttatttcacagcgtaacttaaatcaacaacgggtagtacaattcgccaatcacgctgtagaggaattagataaagtactgcttcccctacaggcaggtagcgaagtcttgcttccgctgattggtctgccctgctctgtcgcccatttgccattacgtaaacaggcggcaaaactccaaactgtgcgatccattggcctggtgcaagacggcacactttattgctccagcatttttggttatcgcaatgtgcccgtcgtggacattctggctgaacttcctgcaccgcaaccacttttacgcctgacgatcgaccgtgccctgattaaaggcagtccggttttgattcaatggacgcctgcagcgggcagtagcaatgctggggtcatggagatgattaacatcgacttactgacggcaatgctgcttgagccacaactgccgcaaatcagtagcgccagcctgacggtggacaaacggcatttgctctatggtaatgggctggtagattcccttccgcaacctgaagacaatgaaaactatcaggtttcttcgcaacgctttccttttaccattaacgttaatggtccgggggctacggcgctggcatggcactatcttccaacacaattaccgctggcggtgctgctaagtttactggtgggctacatcgcctggctggcgaccgcttaccgaatgagcttttcccgcgaaatcaatctgggcctggcgcaacatgagttcgaattgttctgtcagcctttgcttaatgcgcgcagccagcaatgtattggtgtagagattttgctgcgctggaacaatccgcgtcagggctggatttcaccggatgtgtttattcctatcgcggaagaacatcatttaattgtgccactgacccgctatgtgatggcagaaaccattcgtcagcgccatgttttcccgatgagtagtcagtttcatgttggcattaacgtcgcacccagccattttcgccgtggtgtgctgataaaagatctcaatcagtactggtttagcgctcacccgattcagcaactgatcctcgaaatcaccgaacgcgatgccttactggatgttgattatcggattgcccgcgagctgcatcgtaaaaacgtcaaactggcgattgatgacttcggcaccggcaacagctcgttttcctggcttgaaacattacgtcctgacgtgctgaaaattgataagtcatttaccgcagctataggttctgacgcggttaactcgacggtgaccgatatcatcatcgcgctggggcaaagactgaatattgaactggtggcggagggcgtggaaacgcaagaacaggcgaagtatttgcgccgtcatggcgtgcatattttgcaagggtatttgtacgcacagccgatgccgctacgtgattttcccaaatggctggcgggcagccaaccgccgcccgcccggcataatggacatatcacgcccattatgccgttacgttaacgcttactcatcttcatcgtgcgccggttgctctttaacaatgcgaaccagatcaacacgataatcattggcttcaatgatggtgatatgcagtggccctacatcaatcacatcgcccacacggggaatgtgaccatttgccgagatcacgaggcccgcgaccgtcgcgatatcatcgtcatcggcaaggtgctcaacatcaagcgcctgctgcaaggcatgcaaatctgtaccgccttttaccagccagccgtcaccatcagtaatgatttccggcgtttcgtcagcgtccgggaattcacccgcaatggcttccagcacatccagcggcgtgaccagaccttgtaccacaccaaactcgttggtcacgataacaaagctcccgcgagcacgacgcagcacgcccaacaggttgatcggatcgagggtttccgggacgataatcgccggagacgccgaagcaatcgccgccacatcaacgccctcttccagcgccaccagcagttctttagcacgtacaataccgatgatttcatccagttcaccgcgacataccgggaacagactgtgcggtgaagagagcagttgctcgcggatttcatcgaccccgagattagcgtcaacccagcttatttcaccgcgcggcgtcatgatcccgcgcagagaacgcgacgccagcgtcagtacgccgttaatcatgtaacgttcttcttcggcaaatgcaccttccgggatcggcatcggcatcgggttatcggcatcgtgctgaacattggcctgacgtttcccgcccatcaaacgcaggatggcatcggcagtacgcgctcgcagcggcaaagtcgactggtggcgaataaagttgcgacgcgcaatctggttaaacacttcgatgatgatcgagaagccaatcgcggcatacaggtaacctttcggaatgtggaaaccgaaaccttctgccaccagactcagaccaatcattaacaggaagctcagacagagcaccaccaccgtggggtgctggttaacgaatcgcgtcagcggtttggatgccagcaacataaccgccatcgcaatcactaccgccgccatcatcaccggcagatggttaaccatccctactgcagtaattaccgcatccaacgagaagacggcgtcaaggatgacaatctgtgtgacgaccacccagaaactggcgtagcctttaccgtggccggaatcatgatcgcggttttccagccgttcatgcagttcggttgttgctttgaacagcaagaatatccccccgaacaacataatcaggtcgcgtccggagaaggagaaatccatgacggtaaatagcggtttggtcagcgtgaccatccatgaaatcagcgacagcagccccagacgcataatcagcgccagtgataaccccagcaaacgcgctttatcgcgttgttttggcggcagtttgtcagcaagaatggcgatgaagaccaggttatcgatacccagcacaatttcgagaacaacaagcgtgagtagccccgcccaaattgaggggtccattaagaattccatgacaagctcctgcttaaggaatagctattcgacgccagaaataatgcaggcgtaacgacaaaatgcaaacgaaaggtgcggcatagagtgccagaaaggcaggcgttaaaaggcctgatgctgaaatgacgtcggtgacgatccatactgcgggctactgccctatactccatggttgttaaacgggagttaaacatatcagagacgcctctgatttggcaaagatttaccttcctttgcaaacgaatgtgacaaggatattttacctttcgaaatttctgctaatcgaaagttaaattacggatcttcatcacataaaataattttttcgatatctaaaataaatcgcgaaacgcaggggtttttggttgtagcccttatctgaatcgattcgattgtggacgacgattcaaaaatacatctggcacgttgaggtgttaacgataataaaggaggtagcaagtgaccattgctattgttataggcacacatggttgggctgcagagcagttgcttaaaacggcagaaatgctgttaggcgagcaggaaaacgtcggctggatcgatttcgttccaggtgaaaatgccgaaacgctgattgaaaagtacaacgctcagttggcaaaactcgacaccactaaaggcgtgctgtttctcgttgatacatggggaggcagcccgttcaatgctgccagccgcattgtcgtcgacaaagagcattatgaagtcattgcaggcgttaacattccaatgctcgtggaaacgttaatggcccgtgatgatgacccaagctttgatgaactggtggcactggcagtagaaacaggccgtgaaggcgtgaaagcactgaaagccaaaccggttgaaaaagccgcgccagcacccgctgccgcagcaccaaaagcggctccaactccggcaaaaccaatggggccaaacgactacatggttattggccttgcgcgtatcgacgaccgtctgattcacggtcaggtcgccacccgctggaccaaagaaaccaatgtctcccgtattattgttgttagtgatgaagtggctgcggataccgttcgtaagacactgctcacccaggttgcacctccgggcgtaacagcacacgtagttgatgttgccaaaatgattcgcgtctacaacaacccgaaatatgctggcgaacgcgtaatgctgttatttaccaacccaacagatgtagagcgtctcgttgaaggcggcgtgaaaatcacctctgttaacgtcggtggtatggcattccgtcagggtaaaacccaggtgaataacgcggtttcggttgatgaaaaagatatcgaggcgttcaagaaactgaatgcgcgcggtattgagctggaagtccgtaaggtttccaccgatccgaaactgaaaatgatggatctgatcagcaaaatcgataagtaacgtattgtgttgattatcactcagttttcacacttatgtcttacgtaaacaggagaagtacaatggagattaccactcttcaaattgtgctggtatttatcgtagcctgtatcgcaggtatgggatcaatcctcgatgaatttcagtttcaccgtccgctaatcgcgtgtaccctggtgggtatcgttcttggggatatgaaaaccggtattattatcggtggtacgctggaaatgatcgcgctgggctggatgaacatcggtgctgcagttgcgcctgacgccgctctggcttctatcatttctaccattctggttatcgcaggtcatcagagcattggtgcaggtatcgcactggcaatccctctggccgctgcgggccaggtactgaccatcatcgttcgtactattaccgttgctttccagcacgctgcggataaggctgctgataacggcaacctgacagcgatttcctggatccacgtttcttctctgttcctgcaagcaatgcgtgtggctattccggccgtcatcgttgcgctgtctgttggtaccagcgaagtacagaacatgctgaatgcgattccggaagtggtgaccaatggtctgaatatcgccggtggcatgatcgtggtggttggttatgcgatggttatcaacatgatgcgtgctggctacctgatgccgttcttctacctcggcttcgtaaccgcagcattcaccaactttaacctggttgctctgggtgtgattggtactgttatggcagtgctctacatccaacttagcccgaaatacaaccgcgtagccggtgcgcctgctcaggcagctggtaacaacgatctcgataacgaactggactaacaggtgagcgaaatggttgatacaactcaaactaccaccgagaaaaaactcactcaaagtgatattcgtggcgtcttcctgcgttctaacctcttccagggttcatggaacttcgaacgtatgcaggcactgggtttctgcttctctatggtaccggcaattcgtcgcctctaccctgagaacaacgaagctcgtaaacaagctattcgccgtcacctggagttctttaacacccagccgttcgtggctgcgccgattctcggcgtaaccctggcgctggaagaacagcgtgctaatggcgcagagatcgacgacggtgctatcaacggtatcaaagtcggtttgatggggccactggctggtgtaggcgacccgatcttctggggaaccgtacgtccggtatttgcagcactgggtgccggtatcgcgatgagcggcagcctgttaggtccgctgctgttcttcatcctgtttaacctggtgcgtctggcaacccgttactacggcgtagcgtatggttactccaaaggtatcgatatcgttaaagatatgggtggtggcttcctgcaaaaactgacggaaggggcgtctatcctcggcctgtttgtcatgggggcattggttaacaagtggacacatgtcaacatcccgctggttgtctctcgcattactgaccagacgggcaaagaacacgttactactgtccagactattctggaccagttaatgccaggcctggtaccactgctgctgacctttgcttgtatgtggctactgcgcaaaaaagttaacccgctgtggatcatcgttggcttcttcgtcatcggtatcgctggttacgcttgcggcctgctgggactgtaagactgttgtacactaccggggccttttggccccgtttttttatctggaggattaatgacaatcacggacctggtactgattcttttcatcgccgcactcctggccttcgcgatctacgatcagttcatcatgccccgccgtaacggccccaccctgctggcaattcctttgctccggcgtggtcgcatcgatagcgttatcttcgtcggattgattgtcattcttatctataacaacgtcacgaatcatggtgcgttaataacgacatggttattaagcgcactggctctgatgggtttttatatattctggatccgcgttccgaagatcatctttaaacaaaaaggttttttcttcgccaatgtctggattgaatatagccgaatcaaagcgatgaacttgtcggaagatggcgtgttggtgatgcaattagaacagcgtcggctgttaatccgcgttcgaaatatcgacgatctggaaaaaatttataagcttctcatttcaactcaataagttatgaatttagccaaagctatgtttagtgtatttttaataatcagacatagcttaggctatattacctcttcccttatttgttatttattttaacgtttcattgatatataaatccaaatgaaaatcgttatcaataaagcaatgaaataatatattccaacagttgttttatattctcaaaatatgttaaggttgcgccctcatttggggagtagccgatttccagattccggaaatgtacgtgtcaacatactcgttgcaaaacgtggcacgtacggactgaatactttcagtcaggcgagaccatatgcacatcaatcgctatgcctgcatgaacgcgaaaaccatcacggcttgttgttcatgtatgcatgtttgctgggggcgatgatgtgttttatggataccccggtcaggacattgtcatgaatatcactgctactgttcttcttgcgtttggtatgtcgatggatgcatttgctgcatcaatcggtaaaggtgccaccctccataaaccgaaattttctgaagcattgcgaaccggccttatttttggtgccgtcgaaaccctgacgccgctgatcggctggggaatgggcatgttagccagccggtttgtccttgaatggaaccactggattgcgtttgtgctgctgatattcctcggcgggcgaatgattattgagggttttcgtggcgcagatgatgaagatgaagagccgcgccgtcgacacggtttctggctactggtaaccaccgcgattgccaccagcctggatgccatggctgtgggtgttggtcttgctttcctgcaggtcaacattatcgcgaccgcattggccattggttgtgcaaccttgattatgtcaacattagggatgatggttggtcgctttatcggctcaattattgggaaaaaagcggaaattctcggcgggctggtgctgatcggcatcggcgtccagatcctctggacgcacttccacggttaataagaacgctgccagaggtgaatattaaagtccgtctggcagtcgaacacttcttttgctgccagtgtttgccagacttctggcttcgcacgccaggcaaacggcgtcatctgcaataatgcgacggcttcatcaccgcgaagacgcatcggataacacaactccgcactctgctgtaatgtaaaaccttccagttgttctgcatgaggtgcatgaagatgtacttcattgtaaatcagccccttcagctccatcaaatgtcgcggtcccggcgtggcagtaatgacccagccgccgggcttcactactcgtgctaattcttctgctttacacggcgcgtaaatacgtattatggcgtccatactggtatcggaaaacggcaaacggtggctggaagcgacacaaaaagtgacctgcggatagcgtttcgccgccgcttttatcgctaccttcgaaacatccagaccaaacgtggtgatttcgggcaacgcatcggcaaatgcgtgtgtgtaatacccttcaccacagccaatatccagcaccgccgtggccttatcatcaagccgttccctcagttgggcgacaattgcatcacgcagcggctgataatgtccggcatctaagaatgcgcggcgtgcttgcatcatttccgcgctgtcgcccggatcacgagaccgtttatgctgaacgggcagcagattgacatacccttctttcgccatatcaaactgatgtcgctggggacagatatagctgtttttttcacgcgaaagaggctgatggcaaagtggacaggaaaaagacatgacaactccggcaggatactaaaggccgcaagtgtaacgcgaatcacgcggcgggcaaatatccgaacgccaggagcgaagataaagcatagtaaaaagcctcgcattcgacgaggctttatagcgagattgaagcgtattcacacttcagatcagtggattcgatcagatagctgttacgttaacagctgccggacctttctggccgtcctgaatttcgaactcaacgttctgaccttcagccagagttttgaagccattaccctggatagcggagaagtgtacgaacacgtctttgctgccatcagccggagtaatgaagccaaaacctttagactcgttgaaccacttaacctgacctttaatctttgccatttgaaaaattccttagattgttttcttcgcccgcaggcataacatagataaaactgacacattactgcatgaggcaccaatataaggctcggcagagaagcggtattcaacgtcaacgtgtttactcaggacttctttactgaaaatgccacacataaacagaactgtacctcgtttaacccgaaatctgttatcacatacaacgttaattatggcaagccatttttaaacatgtctcgatcagacgcacaaatctcgatacgtcttccactttttttgcacacttatgcaacggaatacgcgccgatatatcattgtgcttaaccttgccagttcaggcagatacttaaactggcgtagtttctaacatagttcaataagttcagttgttccaggccagtgggagaagttattacatagtgcgtgcaatatcacattttttgctatgcaatgaataaaaagttatatcactttttctcataaaacagtcagttaacggctatcaattaccctaaagagaagtcaatccccaaagggattgaaaatttaaaataagaaaaattgatgaatgagcaaaaaatcaagagagaaacgtttcgctaataaataataccacgcttaatcacaaatccgatgtaaacatcctaataaattaatgaggaaaatatctttttctgatatcccgttacgcaaataaataatatgataattatttgaagtcagaccagagttttaatttgaagcagttgcaccatggcagtgcgtataatcaggatgaattgagtaacccttcaacgacggggttactcaagattgaggaaggattatcgttcggcgaccagacgaataatatcttcgtcttcaaccgatttttgactctcaacggtctttttatctgctttctcaggttcgtttgcttcgcacaaacgacgtaacagtgcattttgacgtttttgctgatccagcaacgcctcaagcagttcaatctgttcgttagtccgagaactggcacgattgataaaaaaccacaagatgagcccgataagaagaaccaccaccgatacaaccaaagacgcaatgttcatcacgcctgaatttacaacttcgttcatttcaccacctctgagtagaggcgctattctaccactgctggagaggaagaaaatctagtgctgaaaaaatgatatcaccacgggataaactggttaatggcacaaattccgctgaaaaattgtacatcctgatcgcacatcatgttgaatacctgcgcccaaagcagcaagcaagccaacaccacgacaaccagaacgacccatcgaaactttttcactccaatctccgcttcacctaccttatgtcattaaactagcatgcgttagttaaacagcgcctaactatgtcgatattcgtgctttttcggaatgagtagcttgcttcagcgcatattgccgctacgattaagcgaacataaaaagagaagaggttgtaatgcgattcatcattcgcacagttatgctgatagcactggtatggataggattattactcagcggatatggcgttttgattggaagcaaagagaatgccgcaggattaggtttgcaatgtacctatctgactgccagaggcaccagcacggtacaatacttgcacactaaaagtggtttcttggggataacagattgcccactgttacgtaaaagcaatatcgtggtcgataatggttaagggtaataaataaccagattctcactcatgagtaaaatattcttatagcaagcgcgtttaatataacgcaccttcaactttatttttctcatgctaaataaagaacctgtctgtttgatattccgacaggttcttactctcatcagaacggatagtcgtgataacccatttgggcagaaattttgcgcgctgcggtatgcaacattgcgacatattcctgtaaacgctcttcagagaaacgcaacgtcgggaaggagatgctcaaaccggcaatgaccacgccaaagcgatcaaataccggtaccgcaatgcatcgcagcccttcttcctgctcttcgttatcttcgccatacccctgctcgcgcacctggtccagaacgggtaataacgcttctgtactggtgatggtccgctcggtactgcgtttatactccacgccctcaagaatttgcttcacttcatcgcgatcgcgccatgccagcagtaccttaccaatcgcggtgctgtacagcggattacgacgcccaatccgtgaatacatgcgcaaattgtacatagagtcaattttgtgaatgtaaacaatactgtcttcgtccagtgcgccgaggtggatagtttctttggtcaggcgggagatctcacgcatctggatatctgcgctacgaattaaatcgacgttttgtaacgcgcgagcgcccagttcaaacaatttcagggtgagggaatatttctccgactccccttcctgcgccacataacctaaggttttcatggtctgtaaaaagcgataaacggtgctttttgacatcatgacgcgctgcgacagctcggttatccctatttcgcgctcttcacccagcgcctgcaaaatgccaaaaacttttagcacggaagatacagaatcaggctgtttatccagatctgcgttagccatttatcacctcattgcgagtgttttataaaaatcagaactgttttttattataatttcgcaccagggtggtcgcaatccatcttttgccggttagttacaattctgcgacatccaccgtgaatatcagtgctagaatcatacccctgttgattattcaccaaagatataaaattcctatgccaaaagttcaggccgacggcctgccattgccccagcgatacggtgcggtattaaccattgtgattggtatttcgatggctgtccttgacggcgcaatcgccaacgtcgccctgccaacaatcgccacggaccttcatgccacgccagccagttccatctgggtagtgaacgcctatcaaatcgccattgtcatctccctgctctcgttttcgtttctgggcgatatgtttggctatcgacgtatttataaatgcggtctggtcgtttttctgttgtcttcactgttctgcgccctttctgattcgctgcaaatgctcacccttgcgcgtgtcatacaaggtttcggaggtgcagcgttgatgagcgttaataccgcacttatccgcctgatctatccacaacgttttctggggagagggatgggcataaactcgtttattgttgccgtctcttctgctgccgggccgacaattgctgcagcaatcctctccatcgcatcctggaaatggttatttttaatcaacgtaccgttaggtattatcgccctgcttctggcgatgcgttttctgtcacccaatggttctcgcgccagtaaaccccgtttcgacctgcccagcgccgtgatgaacgcgttaaccttcggcctgcttatcactgcgttgagtggtttcgctcaggggcaatcgctgacgttaattgctgcggaactggtggtaatggttgttgttggtattttctttattcgccgccagctttctcttcccgtaccgctgctaccggtggatttactgcgtatcccgctgttttcactttctatttgcacatctgtttgctctttctgcgcacaaatgctggcaatggtttccctgcccttttacctgcaaaccgtgctcgggcgtagtgaagtcgaaacaggtttacttctgacaccgtggccgttagcaacgatggtgatggctccgttggcaggctatttgattgaacgcgtacatgcaggattgctgggtgctctagggttgttcatcatggctgcggggcttttttccctggttctgctgcccgcgtcacctgcggatatcaatattatctggccgatgatcttatgtggcgctggatttggcttgttccagtcacccaataaccacaccattattacctccgctcctcgcgaacgtagcggtggagccagtggcatgttaggaacggctcgtctactgggtcagagtagcggcgcggcactggtggcgctgatgctaaatcagttcggtgataatggtacgcacgtttcgctgatggctgcggctattctggcagtgattgctgcctgtgtgagtggtttacgtatcactcagccacgatccagggcataaaaaaagcgcgtcgatcaggacgcgctttttagtatttacttcatattacttcaggtattcacccgtacgcagagcttcaattcgtttatccagcggcgggtgagtcatgaacaactcactgagcgatttcgacttaccgttaatgcagaaagccatcatgctggttgcttcttgcggttcatagctggttttcaggcgctgcagcgcggcaatcattttctcgcgaccaaccagttttgccgaaccggcatcagcatggaattcacgatgacgcgagaaccacatggtgataatgctcgccagaataccaaacaccagttccagaaccgttgcaaccgcaaagtagatcagcgggttgccgttgctctcttcaccttcatcacgatttccgcccataaaacccgcggcaagctgcgccagaatacgggaaataaagataacgaaggtgttcaccacgccctgaatcagcgtcatggtaaccatatcaccattggcgatgtggctgatttcgtgagcaattaccgcctcggcttcatccgggctcatgttctgcagcaaaccggtgctgacagcaaccagagaggcatcacggcgcgcaccggttgcaaaagcgttgatgtccggcgcatggtagatagccacttgcggcatagcgatccccgcctgacgagcctgggttgctacagtattgaccagccaacgttccctttcgttacgcggttgctcgatcacttccccgccaacagatcgtaatgccatccatttggacatcagaagcgaaacgaaggaaccaccaaaaccgaacagcaaggccatgatcatcagcccctgaacgctgctcgactgtatccctgtcaggctcagtaccagcccgaaaacgaccattacggccaggttcgttagcaggaagagcgcgattcgcatcataattttctttttacctcagtttaacaaaacgcaatatgcgatacccacatcgtatgggttacgcgactattttcaagtctggatagtgcgtaagtcaccagaaagacacaactttacattttgtagcatctgatttacggcatcttgccgctgttaaaaaatcaggcacaatttcttgtgcctgattgatattacttgacgggagcgggttgttccgcgggtctggctttttcaagcttcgccagatcgagtgcgatattcaccgtctcatccagataaggatccggctcctggtaatctttcggtagatcatccagcttcttcaactccggtttaccttcgcgtttaaagcgttcgttcaaacgcgccagacgcgtcgcatcatcttcattattctctttctcacgcacagcgtagttcagagaaacgatattgcgcttgtccttcatagcgttgaagcgcgcgatatccttcatgatgttctggaactcaggatctttcgcgatacgcgcattatgttccttcagcagctccggttcaaaggcagttaaatttcctgatttcacataagtcgcggcatcgatgctatcccacggcagcgcgttatcttcgaatttctcacccgtttccgtttcttcattacccgtcggcatgatgatgtctggcgttacgcctttacgttgcgtactgccgccgttaacgcgatagaatttctggatcgtgtactgcacagaacccagcgctggccattcaggacgtaacatctgatcgtaaatacggttcaatgaacggtattgctgaacggtgcctttaccaaacgtcggttcacccacaaccagcgcacgaccgtaatcctgcattgccgcggcaaagatttctgaagccgaagcactgaaacggtcaaccagtaccaccagcgggcctttatagaacacctgcccgtcggtatcgctgtcttcacgaaccttgccgttgttatcgcggacctgaacaatgggacccgcaggaataaacagacctgagagcgataccgcttcggtcaacgccccaccgccattgctacgcaggtcgatgatcacactgctgacattctgtttttccagtttctgcagttgaactttgacatcgtctgtcaaacccacatagaagcccggaatatccagcacgccgactttctctttaccgacggtcttcaccgacattttaaccgcgcggtcttcgagacgaatacgttcacgggtcaatgttacagtgcgggtcttggtccctttaccagcaggtaaaatttccagacgaactttactgcccttcggccctttaattaaggcaaccacatcatcaagacgccagccaatcacgtcaaccatcggcttgcctgtttgaccaacaccgacaattttgtcaccaacgctgatagctttactcttcgctgccggaccacctgccaccatcgaattgataacggtgtagtcatcatccatttgcagcactgcgccaataccttccagcgacaaactcatttcagtgttgaactgttcggtattacgcggggaaagatagttggtatgcgggtcgatttcacgcgcaaacgccgtcattgccagcgagaaaacatcttcgctgttggtttgcgccagacgacgaatggcaaatttgtagcggcgtgtcagggtttcacgaatttctttatccgtttttcctgccagcttcaggcttaactcgtcgaatttgactttactgtcccacagcgcgttcaactcagcctcgtttttcggccagggcgctttgctgcggtcaaggttataagtgtcgttgccggtgaaatccatcggcttttccagtaccgacaaagcgtactggtaacgctcaaaacggcgcttttgcgccagattgtagagatcgtagaaaacgtcgagtttgcctgaacgcagttcatcgcctaactcggttttctttttcgcgaactgttcaacatcgcttgccagcagcacgttgtggctgtaatcgagcagattcaggtagcggtcaaagattttggccgaaaatgcctgatcgaggtcgaactggcgataatgagaacgggtgaagcgcgacgttacgcgctcacttaccgtcgcatgctgcgtctcttcctttaataccggaatttgatcagcacgcgtgatatcttctacagcgaaggtctggcctgctattgcaagcaggccagctaacgcggtaagcctaaaaaacatgttcatgcctggcccggcctccgtttcagaacaccaggtgttctgcgcgcacaatcaaagacatacccgaattcagctggacgcggacgccgtctttggtgatttctaatacggtggcatccatcgcgttttgacccgctttcaccttcagggcttgtccgacagtcagagctgaaatgtcagaaaccggggtgtgctgttcttcgcgaggtgcttttactgtttttggcgctttctctaccggcttttgcgcacgaggtttacgttcagcgccttctttgcggcgtggcgtggtcggacgtggcttgcgttcgcggcgcggtgcgtcttctttctcaccagcagctgcggcagcttcgcgttttttcgcttgctgttcagcacgctgtgcctgaacacgcgctttcgcttcttcaagctgcttgcgagcatgctctacatgttgctcgtccagctcaccgcatgggttgccgtcaagatcgacacgcgttgcgccgggtttaacaccgtaaagataacgccagctcgaagtgtagagacgtaaagcggatcgtaattgcgttttgctcaggttcatttccccggcaacacgatcgaccaaatcctgaaaaataccgattttcagcggacgcgcttcaccttccgcactgaaacagtggggaaaacgttcggccagaaacgcgattacttctttactgctattcaacttaggttgattttccatgaaatttcctgattacaacggacgtagccaacaagcgcaggcatgaacaggcgtcattataatgacgctaccagtaaatgctacgttatccgttgattatcctgcgacgctcgcaaagaattttttgtaatccgtcgttgcaagcactttttcaagctgtgccacaagctgacgtaagccttgctcgtcctcgtctgtaaagcgaccgaagacggtactatcgatgtcaagaacaccaataatctgatttttcaccaccagcggcagaacaatttcagaattactcgccgcatcacaggcaatatgcccgtcaaacgcgtgaacatcctcgatacgctgcacttgattgcgggcaaccgcagtgccgcacaccccgcgcccgacgggtatccggacacaggcaattttgccctgaaatggtccgagtaccagtgtatcgtcctcaagcaaataaaaacctgcccagtttacgtcagtgagacgctcgtataacaacgcactggtgttcgcaagcgttgccagaaaactggtttctcccgccatcagcgcgttaaagtcgcgatttaaatccgcgtaaaattctgttttgttcattatataatcacttgtttgtcttacctggaactgccagcctattaaaataagcattaaatgcgttaatgctcaagatcattcccatcatgggttaagattaatgttaattcttattacatttggcacgtcatggctcttaacacaccacaaattacgccgacaaaaaagataacagtgagggcaatcggcgaggaactgccgcgtggtgattaccaacgttgcccgcaatgtgacatgctgtttagcctgcccgagataaattctcatcagagtgcctattgtccgcgctgtcaggcaaaaattcgcgacgggcgcgactggtcgctaacgcgcctggcggcaatggctttcaccatgctgttgctgatgccgtttgcctggggcgaaccgctgttgcatatctggctgttaggtattcgtatcgacgccaacgtcatgcaaggcatctggcaaatgaccaaacagggcgatacgataacgggggcgatggtctttttctgcgttattggtgcccccctcattctggtgtcctccatagcatatttatggtttggtaaccgactgggaatgaatttacgtccggtactgctgatgcttgagcgacttaaagagtgggtaatgctggatatctacctggtcggcattggcgttgcttctataaaggtacaggattatgcccatatccaggcgggtgtcggcttgttctcttttgtggcgttggtgattttaacgacggtgacgttgtcacatcttaatgtcgaggagctgtgggagcgattttatccgcagcgccccgctacgcgtagggacgagaaacttcgtgtctgtcttgggtgccattttaccggctatcctgatcagcgtggtcgctgcccgcgttgccatatcccgctacgcctgcgtcgccgtcatagtttgcaaaaatgctgggcggcgctgttagcgtcaatcgttttgttgttacctgccaacctgttgcctatttctatcatttatctgaacggaggacggcaggaagatacaattctttccggaattatgtcgctggcaagtagcaacattgcggttgcgggaatcgtgtttatcgccagtattctggtaccgtttactaaagtgatcgtcatgttcactttactgttgagcattcattttaaatgccagcaaggtttacgcacacgcattctgttactgcggatggtgacctggattggtcgctggtcgatgctcgacctgtttgtcatatctttaaccatgtcgctgattaatcgcgatcagatcctcgcttttactatgggaccggctgcgttttatttcggcgcagcggtaattttgactattcttgctgtggaatggctggacagccgcttactttgggatgcacatgagtcaggaaacgcccgcttcgacgactgaagcgcagattaaaaataaacgccgtatctcacctttctggctgctgccgttcatcgcgctaatgattgccggttggctgatttgggacagttatcaggaccggggtaataccgtcaccatcgactttatgtcggcggatggtattgtcccgggccgtacgcctgttcgttatcagggcgttgaagtcggaacagtgcaggatatcagcctcagcgacgatcttcgtaagattgaagtcaaggtcagcatcaagtccgatatgaaagatgcgctgcgcgaagagactcagttctggctggtgacgccaaaagcatcgttggcaggtgtctccgggctggacgccctcgtcggtggtaactatatcggcatgatgccaggtaaaggtaaagagcaggatcactttgtcgcactcgatacccaaccgaaatatcgactggacaatggagatctgatgatccacctgcaagcccccgatctcggttcgctgaacagcggttcattggtctatttccgcaagatccctgtgggaaaagtctacgactatgccatcaatcccaacaagcaaggcgtggtgattgatgtcctgatcgagcggcgttttaccgacctggtgaaaaaaggtagccgtttctggaacgtttccggcgttgatgccaacgtcagtatcagtggcgcgaaggtgaaactggaaagtctggcggcactggttaacggtgcgattgccttcgattcacctgaagagtcgaaacctgccgaggcggaagatacctttggtctgtatgaagatctggcccacagccagcgcggcgtaataataaaactggaactgccgagtggggcaggattaaccgccgactcgacgccattaatgtatcagggactggaagtcggacagctaactaaactggatttaaatcctggtggtaaagtcactggggaaatgaccgttgatcccagcgtcgttaccctgcttcgtgaaaatacccgcatcgaattacgtaatccgaaattatcccttagcgatgccaatctcagcgccctgctgactggcaaaaccttcgagttggtacccggcgatggcgagccacgcaaagagttcgttgttgtgccaggcgaaaaagcactgctgcatgaacctgatgttctgacgctgaccctgaccgcgccggaaagttacggtattgatgcgggtcagccgctcattcttcacggcgtgcaggtaggccaggttatcgatcgtaaactcaccagcaaaggcgtcacctttaccgtcgccatcgagcctcagcatcgcgaactggtaaaaggcgatagcaaatttgtcgtcaacagccgtgtcgatgtgaaggtggggctggatggcgttgagtttctcggtgccagcgcctcagaatggatcaatggcgggatacgtattctgccgggcgataaaggtgagatgaaagccagctatccactgtatgccaatttggaaaaagcgctggagaacagccttagcgatttacccaccacaaccgtgagtttgagtgcagagacgctgccggatgtgcaggcaggatcggtagtgctgtaccgtaaatttgaagttggtgaagtgattaccgtgcgtccgcgagctaacgcgtttgatatcgatctgcatattaagccggagtatcgcaaccttctgaccagcaatagcgtgttctgggcagaaggcggggcgaaagttcagctgaatggtagtggtctgaccgtacaggcatccccgctctccagagcattaaagggagccattagcttcgacaacctcagcggtgccagcgccagtcagcgtaaaggcgataagcgtattctgtatgcttccgaaacagcggcccgtgcggttggcgggcagattacgcttcacgctttcgatgccggaaaactggcggtcgggatgccaattcgctatctcggtattgatatcgggcaaatccagacgctggatctgattaccgcacgcaatgaagtacaggcaaaggcggtactttacccggaatatgtccagacctttgctcgcggtggtacgcgcttctcagtggtcacaccgcaaatttcggcagctggcgttgagcatcttgatactatcctccagccgtatatcaacgtcgaaccaggccggggcaatcctcgccgcgactttgaattacaagaggccaccattactgattcgcgttacctggatggcttaagcattattgttgaagcgccggaagccggttcgttaggcatcggtacgcctgtgctgttccgtggtctggaagtcggtacggttacaggaatgacgctggggacattgtcagatcgcgtgatgattgcgatgcgcatcagtaaacgctatcaacacctggtgcgtaacaattccgtcttctggttggcatcgggttacagtctggactttggtctgacgggcggcgtagtgaaaaccggcacctttaaccagtttatccgtggcggcatcgccttcgccacgcctccggggacgccactggcaccgaaagcccaggaaggcaagcacttcctgttgcaggaaagtgaaccgaaagagtggcgtgaatggggtactgcgcttcccaaataatgcccactgctccggcgtgcctgcgccggagcgtttatgctaaactgcgcgcctgtttttttgccagtggtatatgctcgtggcccaacacaccgtttatttcccggacgcctttctgacgcaaatgcgcgaagcgatgccttcgacgctctcttttgatgattttcttgccgcctgtcagcgcccgttgcgccgcagtattcgcgttaatacgctgaaaatctccgttgctgatttcctgcaattaaccgctccttatggctggacgcttacgccaattccgtggtgtgaagaaggtttctggattgaacgcgacaatgaagatgcattgccattgggtagtaccgccgagcatttaagcggcctgttttatattcaggaagccagttcaatgttgcccgtcgccgccttgtttgctgacggtaatgcaccacagcgggtgatggatgtcgctgctgcgccaggctccaaaacgacgcaaattgccgcacggatgaataacgaaggggtaatccttgccaatgagttttccgccagtcgggtaaaagtgttacatgccaatatcagccgctgtggcatcagtaatgttgcgctcacacattttgatggccgcgtgtttggtgcggcagtgccagaaatgttcgatgccattttgctggacgctccctgctccggcgaaggcgtggtgcgtaaagatcccgatgcgctaaaaaactggtcaccagaaagcaatcaggaaatcgcagctacccaacgggagcttatcgacagcgcctttcatgcattacgtcctggtggtacgctggtttactcgacctgtaccttaaacagggaagaaaacgaagtcgtttgcctgtggctgaaagagacttaccctgacgcagtagagtttttaccacttggcgatctcttccctggtgcaaacaaagcgctgaccgaggaaggctttttgcatgttttcccacaaatttacgactgcgaaggcttcttcgttgctcgtctgcgtaaaactcaggccattcccgccttacccaccccaaaatacaaagtgggcaatttcccgttcagcccggtgaaagatcgcgaagccggacaaattcgtcaggcggctgcaagtgttggtttaaactgggatgaaaatctgcgcctctggcagcgtgacaaagaactgtggttgttcccggtgggcattgaagccctgatcggtaaagtccgattttctcgcttggggattaaacttgccgaaacgcacaacaaaggttatcgctggcagcatgaagcagttattgcccttgccacccccgacaatgtgaacgcttttgaactgacaccgcaggaagcggaggagtggtatcgcgggcgcgatgtttacccgcaagccgcgccagtggcggatgacgtgttggttactttccagcatcagccgattggtttagccaaacggattggttcgcgactgaaaaacagctacccgcgtgaactggtgcgggacgggaaactttttaccagtaacgcatgacagcgcacaaaaaaagcgcactttttgactggcacattcggcggcctcaactaggctgaaaaatggtgcgatcggactggtcgtaccacaatcggcagctaaatggagagcacgaagatgaaaaccagtgtgcgcataggcgcttttgaaatcgacgacggcgaattacacggtgaatcgccgggtgatcgaacgttaaccattccttgtaaatctgaccccgatttatgtatgcaactggatgcctgggatgctgaaaccagtatccctgccctgctaaatggcgaacactctatcctttaccgtacccgttacgatcaacaatctgatgcctggattatgcgtcttgcctgatccaaaaagaacccgtcggcatggcgggttatttgtcctggttattcccccgttgtaaaatctctcctaaacttaacggtacggcaccacacttcggggatgaaatgttcgcgctggtactttttgtttgctacctggatggcggttgtgaagatattgttgtggatgtctacaacacggaacagcagtgtcttcattctatgagcgatcaacggatccgccagggcggttgttttccgattgaggattttatagatggtttctggcgacctgcgcaggagtacggtgatttttaattatgcaattgcacaagagtcagttcgcccccaaaggcagcaccggtatcaatataatgcaggttgccaatatccacgcgatgtcgcaacggtgtatgaccaaaccagaaatgatcagcacctgtaattccctgcccttttgggcgttcacctaatcgtgagcggctccacaagacctgatgcaaatcaacgtccttttgccattcataaacatcatctggataatcggcatgagcaataacatgtttgccggtgcggctgtgtacttcaagaataaagggcaaatgctgacatttttccagcgccgttttcgcttgtttctgttgattatctgccagcgcaataaaccagtcgccgccattcatcaaccacaaagacatctgctgggatgccagcgcatccatcgccatctgttcatgattgcctcttaccgcacgaacccaatgttgttccagtaactgcagacaacgtaaactttgcggcccacgatcgataacgtctcccactgagataagtaaatctcgccacggatcaaaacgacaatgccataatttgcggcgcaactgctcaagacaaccgtgtatatcgccagaaagccagatatgtcgccattgatgacccgcaattctctgataaacgggcgcaggctgtttcatcaatattttcctcccgcgctaaagatcacataatcttaacaagaatgttaaaaaacgctggactcagacagtagagtgtgtgttatggttgactataaagtcagcgaaggaaatgcttctggcttttaacagataaaaagagaccgaacacgattcctgtattcggtccagggaaatggctcttgggagagagccgtgcgctaaaagttggcattaatgcaggcttagttgccttgccctttaagaatagatgacgacgccaggttttccagtttgcgtgcaaaatggtcaataaaaagcgcggtggtcatcagcttaaatgttaaaaaccgcccgttctggtgaaagaactgaggcggtttttttattggaaatcaaaaggctattttaggtaattaacagagtttttcagctcgttctataaacggtgccagactcattttttcgccgggattgttaggatcatcaatctgaatcaccgaaatgggttgggctttagtcttcccactggcaacttccttttgtgcgatatcgtttaaaggatactgcacgagggtacttgggttgatgacatacaaagcattacccggtcggcaagtcagcatcacctcttcgcgattaaacgcccatttgtctttacccacttcaaaacggctgacggtaatcacctgcggtgccgccagcgccgctgcagaactggtgagtaacagaaacgccagaatactttttttcatcattttcgtaatccatcaaaaaggttcgagagtcgcaagcaggctgatgatcaccagcactaccgcacctatcgcccattcgagtttagtcatccacacaaaccagggtgccgcacgatcttcatcctgcctcatgcgcggtacaagaacataacgattagccagcgcaatgaccaccataatcatcaccaggatggctttgagcaataagagttggccccagtaagtcgtaagcgtggggggaaatccggtaatcaacaatgcattaagcacgccgcttgccagtacgccgatcaccgcaaaatgcccgcaccaggaaaaacgcatcagcgcctgaatagtctggtgtcgccaacggcctttgatgagttgcatacaccagagcaccggcagtaatcccccaaaccacgccgccgcacaaatcaggtgaatcgcgtgattagtctgatggattttctccgttaccccttcattcagcgtcgcatgccccactcccgccagcagaaaaaattgcgcggtagtgagcataaacagcaaacgtggcatattccgcggttgcataagggcgacgatcaacgttacgagggcgagaacaatttgccataaccagacgccaccaaactgcgtttgtaaaacagcctgccaaatgtttggcgaaaatacatctgtccatcccgttcccatcaacccgccctgaacggcgagcattgcagtggcactgatcaaactccagacggcagcgtgctgttgtaaacgcagaaaacgcttcgccagcaaacgacgaatcgttaagggggccagccaggcaccgtacattgcgaagccaaaaaccagcatcagcgaggtgaaatggataaatcgcagcgcgatccaggtaaacgccagcatgatttatttcacgctaaaggtgtagtgtcctttcgttttatgcccgtccaccgaaacaacatgccagtcaacggtgtaggttccgggtttcagcgaatcggccagtggaacaatcagttgcttttggtcctgctcatttcgcttcgccggtaatgttttaatattttcgttttttggccccgtgatttttgcaccactgaatcctgtttccacaccttccgagaagtttaaagtgattgcctgcggtgcagctgtcacttgcgcgtttgccgcaggatactgatgcgttaaatgcgcatgtgcccagacggaaggtgtcaccaacgaagtggtcaggattgccagcgcgtagcgaagggagcgtgcagttgaagccatattatctattcctttttgtaataacttttttacagagcataaccttgtctaatgtctgagtcgaggatcatcaattccggcttgccatcctggctcactcttagtaacttttgcccgcgaatgatgaggagattaagaatgctgaagaatctggctaaactggatcaaacagaaatggataaagtgaatgtcgatttggcggcggccggggtggcatttaaagaacgctacaatatgccggtgatcgctgaagcggttgaacgtgaacagcctgaacatttgcgcagctggtttcgcgagcggcttattgcccaccgtttggcttcggtcaatctgtcacgtttaccttacgagcccaaacttaaataaaacttatacagggttacactttcttacataacgcctgctaaattatgagtattttctaaaccgcacccataatttgcagtcattttgaaaaggaagtcattatgtcgttctggaaagttgcagcagcgcaatatgagcctcgtaaaacctcactcaccgaacaggtagctcatcatctggagtttgtgagggccgccgccaggcaacaatgtcagctgttagtttttccatcgctttctttactggggtgtgattattcgcgacgtgcccttcctgccccacccgatctctcactgttagacccgctttgttatgccgcaacgacctggcgaatgaccatcattgccggccttcccgttgaatataacgatcgctttattcgtggaattgcggtgttcgcaccgtggcgaaaaacgcctgggatctaccatcagagtcatggtgcatgtctgggccgtcgttccagaaccatcacggtggtcgatgaacaaccgcaaggtatggatatggacccgacctgttcactgtttacgacagggcaatgtctgggagaacccgacctgctggcgtcggcccgtcgcttacaatttttttcacatcagtactcgattgccgtgctgatggcaaatgcccgtggtaacagtgcactatgggatgaatatggtcgtctcatcgttcgcgccgatcgtggttcattattgttagtcggtcagcgttcatcacagggttggcaaggcgatatcattccattacgctaggctttttcggcctggagcatgccatgttgcgcattatcgatacagaaacctgcggtttgcagggagggatcgttgagattgcctctgttgatgtcattgacggaaaaatcgtcaaccccatgagccacctggtgcgccccgatcgtcctattagtccacaagcgatggcgattcatcgcatcaccgaagccatggtcgccgataaaccgtggattgaagatgtgatcccacactattacggtagtgaatggtatgtcgcgcataacgccagctttgaccgccgcgtactgcctgagatgcccggtgagtggatttgcactatgaaactggcccgtcgtttgtggccagggatcaagtacagcaatatggcgttatataaaacacggaagctcaatgtacagacgccgccgggcctgcatcatcaccgcgcgttgtatgactgttatatcaccgccgcgttgcttatcgatattatgaacacctccggctggacggcagaacagatggccgatatcaccggacgtccgtcgttgatgacgaccttcacctttggcaaataccgtggcaaagcggtttccgacgttgccgaacgcgatccgggctatctgcgctggttatttaataacctgggcagcatgagcccggagctgcgtttaacactgaaacattatctggaaaatacttaatccgcaggcgtagcgggtaatgttccctgcgccagcgcgaccagaaaagcatattccatcgctacgccttcgtacgatttaaagcgaccagatttaccgccatggcctgagtccatgtcggtacagagcaataaaagatggttatcggttttcagctcgcgcaatttagcgacccattttgccggttcccaatattgcacctgagaatcgtgcaaaccggtcgttaccagtaaatgcggataagcctgtgcggtgacgttgtcatacgggctgtagcttttcatgtactcgtaatattgcggatcctgcgggttaccccactcttcaaactcaccagtggtaagaggaattgattcatcaagcatcgttgttacaacatcaacaaacggtacctgggcgataacgccgtggaataattccgggcgttgattaattgcaacgcccatcaacatgccccccgcactcccgcccatcgcataacaaagcgaaggagagccatagcccagttttaacaatgcatcgcaggcatcaagataatcattaaacgtatttttcttcttcagaaattttccgtcttcgtaccattgttgccccagctcaccaccgccgcgaacatggacaatggcgtagacaaagccacgatctaacaaactcaagcggctaaaactgaaatcggcatcaatacttgcgccgtaagaaccatagccatacaccagcaacgggttgtgtcctttgcgaaaatgtttgcgatggtagaccaacgaaaccggaacttcgacgccatcacgggcgactatccacaggtgttcactgcggtaattcgccgcatcaaaaccgggcacttctgtttgttttaatacacgacgctcaccggtatccatatccagttcaaacaaagtgtctggtgtggtcatggaagaataaccataacgcaatcgcgcggtttcaggttctggattgtaggcaatccaggtcacataggctggatcatcaaaggcaataccaatgacttcccgggtcttgcggttaatttggcgcaaactggttaacccgcgctgacgctcttcaaccaccagccagtcggtaaacagcgtaaacccttccagcatgatgttttcgcgtggcggaattaactcttcccactgttgctcatcacgcatacgggtacggtataagccaaagtttttgccgtggcggttggaacgtagataaaaacgatgctggtagtgatcaaggctgtattcgtgatctttgcggcgcggcagaaaaacaaacggctcggcatcggccatttccgcgtccagcaggcgaacttcactggtggtggcgctggccaaatgaatgactacatagtgcttcgaggtcgttttatgcaggctgacgtaataggtatcgtctttttcttcgtagatcagtttatcttgcgatgctggcgtaccgatggcgtgacgccagacctgataaggcagcagcgtcaccggatgcttgcgaacatagtagaaagtccaggagtcatttgcccagacaaagctgggttcaacgttatccagcagttccgggtaccagttaccagtttccagattacgaaaacgaatgccgtactggcgtcgggaaagaaaatcttctgccagcgccataatggtgttatcgggcgtaatcgccattccgcccatcgaataaaactcactatgagctgcgcgcttattggcatcgagcaatgtttcccactcatcccactcttcactgaatgccgattgacgctggtagatagcatattcacagcctggttcataaatatgccgatagcggtagccatttttgatgtagggcgcagaaacttctcgttgcggaatgcggtcgatgatttcctttaagatgcgatcctgcaaggcttgttgtgaggccatcacccgatgaccgtaactattttcttgttgcaggtagtccagaacttccggctgagaacgcgtatcgtcccgcagccagtagtaattatcgattcgcgtatcgccatgaagcgtcatggcgtggggaatgcgggcggcttttggtagcatgttattgttctttctggttgaaacatcttataagggtggcaaaactcaccggggatgcaagcgaaacaggggagtcattgcttagatgatgacaggtaatggcgcggatatcgaatgttatgcagacagagaaaatcagcctgttcaaatggctgtgcgattctggatagcccgaaatagtcaacttcaggctatccagagagcggaattattccgccaaagtgcgtttttgctgttcgagatcgcgttcaatgccgtcacgaacatcctgggggattttcagcgcgtcacccagtgcattcaggtaactgcgttccataaaatggtcaatatcaatagccgcgcaactcaggaaatagatttccagcgcctcttcttcattgcggaccccggtagccaggcgttgtggatccagcggttgttcgattgcctgctcaatgagtacacgcccctgctcttccacgccggcttcacgcaattgctggtcgattgccgcacgttctttggcatcaatatgaccatcacttttagcggcaaagaccagcgcaaggatcaaacgttctgtacgctcatccagcggcgtactttgcgcgccaaactgcggttcgtcctgatgcgccgcgcgaattttatctttgtatttattccacagcaccgtacccgctaccgctccgccgccaaccagtaacgcgttggtgccatatttcgtaagaagtttacgtgctgatttatttgcgaccagcagcccagccagtccgcctaatgcgcctggcactaacagtttgcccaatccctgatccgcagacgaggaggtagaagaactgctttgcccaagcagggattgcaattgatttaaccagttagccatatttgctcctcaataaccatttttagtgcctgtagcatagcggatgaggatgtcagaaaatgtatatcgagacaaaagatgcgcaaataagcggggcggtaggccgttattcaaagaaattcgcgccaggtaaggtatttactgtatatcaggtgataagggtattttaggtgaaagtagtttgtcgttttgagtggcattgtttgatgctgattgcccgatgcgacgctgttgcgtcttctcaggcctacgattgtggtgcgttctggggcggacaaggcactcgcgccgcatccgccaacggtcaatcgaattatcagaagccattaacgccgctgatattccgccattcccgctttgcagtccacgctgacctggtaatgaatatcggcacttttaccacgcacggttagcggtactgaccatttatcatctttaccctgaatgtcctgcaaactgacccaagccacgggatcggcctgaccgacaattttttgatcatctgcccagcgcgccacgcgattttgttgataatcacgttttacgctcgcggcaattccggcagcatccagaccttcacactttgggaaagtgaccgacttgctggtttcattattggcagcgaaaactgatgcgcaggcagaaaccaacaacagccctaaaaacgcccctctttttttcatgtttttctccatagcacaatgattcaggagaaagcatggtacaaattgtcaggagcgcaagttgcttcaggccgcgtgtgaggcatcttcctcttcggattcagcaccgacgacctgtggggacggtaatttgccggttttcagaatggtgctcagcacatctttttgttctgccagccatagcgaaagggcttcacgttgctcgtcttccatttgcactggagaatttgtcagccaggtgtcaagcagatccgccgtatcaagcattttatcataagcatcggcttcctttttgctggtaaacgacattttctcttcgccctcacgaatgactacgtatttaacttcaaccgccatttgcagcctctcataataactgtgattttatacagtatatttcttttcggttgagaaatcaacatcagcaataaagacacgcgcaaacgttttcgtttatactgcgcgcggaattaatcaggggatattcgttatgacgttattaggcactgcgctgcgtccggcagcaactcgcgtgatgttattaggctccggtgaactgggtaaagaagtggcaatcgagtgtcagcgtctcggcgtagaggtgattgccgtcgatcgctatgccgacgcaccagccatgcatgtcgcgcatcgctcccatatcattaatatgcttgatggtgatgcattacgccgtgtggttgaactggaaaaaccacattatatcgtgccggagatcgaagctattgccaccgatatgctgatccaacttgaagaggaaggactgaatgttgtcccctgcgctcgcgcaacgaaattaacgatgaatcgcgagggtatccgtcgcctggcggcagaagagctgcagctgcccacttccacttatcgttttgccgatagcgaaagccttttccgcgaggcggttgctgacattggctatccctgcattgtaaaaccggtgatgagctcttccggcaaggggcagacgtttattcgttctgcagagcaacttgctcaggcatggaagtacgctcagcaaggcggtcgcgccggagcgggccgcgtaattgttgaaggcgtcgttaagtttgacttcgaaattaccctgctaaccgtcagcgcggtggatggcgtccatttctgtgcaccagtaggtcatcgccaggaagatggcgactaccgtgaatcctggcaaccacagcaaatgagcccgcttgcccttgaacgtgcgcaggagattgcccgtaaagtggtgctggcactgggcggttatgggttgtttggtgtcgagctatttgtctgtggtgatgaggtgattttcagtgaggtctcccctcgtccacatgataccgggatggtgacgttaatttctcaagatctctcagagtttgccctgcatgtacgtgccttcctcggacttccggttggcgggatccgtcagtatggtcctgcagcttctgccgttattctgccacaactgaccagtcagaatgtcacgtttgataatgtgcagaatgccgtaggcgcagatttgcagattcgtttatttggtaagccggaaattgatggcagccgtcgtctgggggtggcactggctactgcagagagtgttgttgacgccattgaacgcgcgaagcacgccgccggacaggtaaaagtacagggttaaacccggcaaaaaaacgctacaaaaatgcccgatcctcgatcgggcattttgacttttacagcttagcgccttctacagcttcacgcgccagcttagtaatgcggtcgtaatcgcccgcttccagcgcatctgccggaaccagccaggaaccaccgatgcacagcacgcttttcagcgccaggtagtcacggtagttagccggagaaataccacccgtcgggcagaaacggacctgggagaacggacccgcgatcgcctgcagggctttcacgccgccgttagcttcagccgggaagaatttgaactctttcaaaccgtagtccatacccagcatcagttcggaaacagtgctgatccccggaatcagaggaatagtcccttcggtagcagctttcagcagcggctcggtcagacccgggctaattgcgaactgtgcacccgcttcagtgacttctgccagctgctgtggattcagcaccgtaccggcacccacaatcgcttcaggcacttctttggcgatagcacggatagcgtcaactgcacactcggtacgcagagtcacttccagaacgcgcaccccaccagcaaccaacgcttttgccatcggcaccgcgtgttccagtttttttaccacgataaccggtacaaccgggccggtggtcaggattgattctgcacttgttttccagtttttcatcagagttttctctcgcctgattacaaatttgtcgtcttaaaaagtgatacaggttgcgccctgttcggcaccggacagtttttcacgcaaggcgctgaataattcacgtcctgttcccacgcgtgacgcgctcaggtcaggaatgtgcggttcgcgagcagccagttccgcttcgtctaccagcagcgtcagttcgcctgtctgtccattcacacgaatgatgtccccgtcgcgcacttttgccagcagcccgccatcgtaggcttctggtgttacgtggatagctgacggcactttacctgaagcgccggagagtcgtccatcggtaactaacgcaattttgaaacaccggtccaataatacaccaagtggcggcatgagtttatgtaattctggcattccgttcgcttttggcccctgatgacggacaacaacgacacaatcgcggtccagcaaacccgcttcaaaggccggcataacgtcatgctggctttcaaaaacaaccgctggcgcttcaatcacctggttctcaaccggcacggcagaggttttcataaccgcacggcccaggttaccgcttaacacttttgtcccaccatgatgagagaaaggttgttcgaaggaagcgatcacattgctgtcgagtgatttttccgccccttcccgccagtccagttcaccattattcagccatggttcaagggtataacgagacagaccaaagcctgccaccgtattgacatcttcatgcagcaggcctgctttgagcagttcacgcaccagaaccggtacgccacctgccgcctggatgtggttaatatcggccggaccgttcgggtagagacgtgccatcagcggtacaacatcagaaaggtcagagaagtcatcccagttaatctgaataccggccgcgcgcgccatcgccaccaggtgcatggtgtggttagtggaaccaccggtcgccagcagtgcaacgataccgttcaccaccactttctcatcgatcatcttaccgatcggcatccattcattaccattaccggtcatgcgtgtaacctgacgcgcagcggcagcggtcaaagcatcgcgcagcggagaatccggatgaacaaaagaagagcctggcaactgcatccccataaactccaccaccatctggttggtgttggcagtaccgtagaaagtacatgttcccggcgcatggtaagacgcggcttctgactccagtaaggccatgcggtccactttaccttcggcataaagctggcgaatacgcactttttctttatttggcaaaccgcttgccatcggtccagacggcacaaacaccgcaggcaaatgaccaaacgacagggctgccatcgtcagacccgggacaatcttgtcgcacacaccgaggaacagagcaccatcaaacatgttatgggacagccccaccgccgcagacatcgctatcacttcgcggcttagcagcgacaattccattccatcctgcccctgggtgacaccatcacacatcgccggaacaccgcccgcaacctgaccaaccgcattcgcttcatgcagggctttacgaatgatttctggatagtgttcataaggctggtgcgcggagagcatgtcgttataggaggtgatgatggcgatattgttacgcaacatgcttttcaaagaggctttgtcttctggctggcaggcagcgaaaccgtgtgccaggttaccgcatgccaactgcgaacgatgaacggtcgacgttttcgcttgttctatccgggcgagataagcagagcgagtctcgcgcgaacgttcaatgattcgatttgttacgcgtaacaattgtggattcataaaggctcctgaaattgagttgtcagagcaggatgattcacaacgcgtttcattcagaggatttatgactgaaacgcctgtaaccggagctcatagggcaaaaacgtttcagtcagtgtaataaaaaaagcctcgtgggtgaatccgcacgaggcctgaaagtgtaaaaattgttctacaatctgcgcaagatcatgttaccggtaaaataaccataaaggataagcgcagatattactcaaactcattccaggaacgaccatcacgggtaatcatcgccaccgaggcaacgggtccccaggttccggcctgatacggtttcggcgcatcattgtccatcgcccacgcctcagtaatggagtctacccatttccaggcttcttccacttcatcacgacgtacaaacagtgcctgaataccacgcatggtttccagcagcagacgttcataggcatccgccagatgcgtctgattaaaggtttctgaatagctcagatccagcttggtgatttgcaggttatgtttgtggtcaaggccaggaactttattcagtacctggatatccacgccttcatcaggttgcagacggatagtcagtttattctgcggcagatcctgccacgactctttaaacagattcagttcaggtgttttgaaatagaccacgacttcagaacatttggtcggcagacgtttaccagtacgcaggtagaatggcacaccggcccagcgccagttatcaatgtcgacgcggatcgccacgaaggtttctgtattgctgctcttgttcgcgccctcttcttccagatatcccggcacttttttgccctgggcgaagcccgcagtatattgcccgcgtacggttttttcgcgtacgttggagcggtcgatgcggcgcagggacttcagtactttcactttttcatcgcggatgctgtctgcgctcaggtcagatggcggagacatcgcaatcatgcagagaatttgtagcaggtggttctgaatcatgtcacgcatctgaccggctttatcaaaatagccccagcgcccttcgatccccacttcttctgccacggtaatctcaacatgatcaatggtgcgattgtcccagttattcacaaacagggagttagcaaaacgcagcgccaacaggttcagcaccgtttctttaccaagatagtggtcgatacggtaaacctggcactcctcgaagtattcgccaacctgatcattgatttcctgcgaggtcgccagcgacgtccccagcggtttctccatgactacgcgtgccggtttagcattcagttttgcctcgccaagccctttgcaaattgcgccaaaagtgctgggcggcatggcaaagtagttaatggtgatacgatttttttgatccagcatcgcgccgagaaggttgaatgcagcagtgtcattgacatcgagattacaaaaatccagacgtgcactcagggtgtcccataaaccttcatcaatggtttctttcatgaaagtttcgagcgcctcgcggacaactttggtatatgccgctttatcccagtcagcacgccctacgccgataatccgggtgtccgggttgagctgaccggctttttccagttgatacagggaaggcagcaatttacgacgcgcaaggtcgcctttcgcgccgaaaatgaccaggtcacaggcctgggctgtttgcgttaccgccatgtcattctccttaagttaactaacccggtacttaagccagggtatacttgtaattttcttacggtgcactgtactgcttttacgagcttgcgaaaactgtaaacgcttatccacccgtgcgattacgggaaaagcgcgcaaagtgcggcaaaactgataaaaaaatcatcgttttccattcggtaaaaatctgacactgatcatgttatgaaaaaaaataacaacttttttatctgcttttgtcattaacacggcacacaggcgtaatatctgacaaaactgcatttcgatttctttcagtgcggaaatcgtcattacccgtgagtctctttacatcatgaatatgctggaaaaaatccagtctcagctggaacatttgagcaaatcagagcgcaaagttgccgaggtcattctggcttcgcccgataacgcgatccattcgagtattgctgctatggcactggaagccaatgttagcgaaccgacggtgaatcgtttctgtcgcagcatggacacgcgcggttttcctgattttaaacttcatctggcacagagtctggcgaatggcactccctatgttaatcgcaacgtcaatgaagatgacagcgttgaatcatacacagggaaaatatttgagtccgcaatggcaacgctcgatcatgtccgtcattcactggataaatctgccatcaaccgcgccgtcgacttgctcactcaggcaaaaaaaatcgcctttttcggattaggctcttcagccgccgttgcccacgatgcgatgaataagttctttcgttttaatgttccggtggtgtactccgatgatattgtgctgcaacgcatgagttgtatgaattgtagcgacggagacgtggtggtgctgatttctcacactggaagaacaaaaaatctggtcgagctggcgcagctggctcgcgaaaacgacgcaatggtgattgccctcacctctgcgggtaccccgctcgcccgggaagcaacgctggcaattaccctcgacgtaccggaagatactgacatttatatgcccatggtttctcgacttgcacagctgaccgtgatagatgtgctggcgacaggatttactttgcgacgcggtgcaaaattcagagataacttgaagcgggtcaaggaagcgctgaaggaatcgcgttttgataagcagttacttaatttaagtgacgatcgctaaaaacgactgtcactgtcctaatcttatacgacatccgaatgagattaatttatcgccatcgcggcgttatttcattcggatttcatgttcaagcaacacctggttgtttcagtcaacggagtattacatgtccagaaggcttcgcagaacaaaaatcgttaccacgttaggcccagcaacagatcgcgataataatcttgaaaaagttatcgcggcgggtgccaacgttgtacgtatgaacttttctcacggctcgcctgaagatcacaaaatgcgcgcggataaagttcgtgagattgccgcaaaactggggcgtcatgtggctattctgggtgacctccaggggcccaaaatccgtgtatccacctttaaagaaggcaaagttttcctcaatattggggataaattcctgctcgacgccaacctgggtaaaggtgaaggcgacaaagaaaaagtcggtatcgactacaaaggcctgcctgctgacgtcgtgcctggtgacatcctgctgctggacgatggtcgcgtccagttaaaagtactggaagttcagggcatgaaagtgttcaccgaagtcaccgtcggtggtcccctctccaacaataaaggtatcaacaaacttggcggcggtttgtcggctgaagcgctgaccgaaaaagacaaagcagacattaagactgcggcgttgattggcgtagattacctggctgtctccttcccacgctgtggcgaagatctgaactatgcccgtcgcctggcacgcgatgcaggatgtgatgcgaaaattgttgccaaggttgaacgtgcggaagccgtttgcagccaggatgcaatggatgacatcatcctcgcctctgacgtggtaatggttgcacgtggcgacctcggtgtggaaattggcgacccggaactggtcggcattcagaaagcgttgatccgtcgtgcgcgtcagctaaaccgagcggtaatcacggcgacccagatgatggagtcaatgattactaacccgatgccgacgcgtgcagaagtcatggacgtagcaaacgccgttctggatggtactgacgctgtgatgctgtctgcagaaactgccgctgggcagtatccgtcagaaaccgttgcagccatggcgcgcgtttgcctgggtgcggaaaaaatcccgagcatcaacgtttctaaacaccgtctggacgttcagttcgacaatgtggaagaagctattgccatgtcagcaatgtacgcagctaaccacctgaaaggcgttacggcgatcatcaccatgaccgaatcgggtcgtaccgcgctgatgacctcccgtatcagctctggtctgccaattttcgccatgtcgcgccatgaacgtacgctgaacctgactgctctctatcgtggcgttacgccggtgcactttgatagcgctaatgacggcgtagcagctgccagcgaagcggttaatctgctgcgcgataaaggttacttgatgtctggtgacctggtgattgtcacccagggcgacgtgatgagtaccgtgggttctactaataccacgcgtattttaacggtagagtaagtacgttgccggatgcggcgaaaacgccacatccggcctacagttcaatgatagttcaacagatttcgaatattctgaagcaaacttgaacttatcatcaggcgaaggcctctcctcgcgagaggcttttttatttgatgggataaagatctttgcgcttatacggctggatttcgcccggtttgcgagttttcagcaattttagtatccaggtgtattgttctggtcgcggaccaacaaaaatctcgacttcttcattcatccgccgcgcaatcgtatgatcatccgcctctaacagatcatccatcggtgggcgcacctgaatcgtcagacgatgcgtcttgccatcataaatcggaaacagcggtacaacgcgcgcacggcacactttcatcaaacgaccaatcgcgggcaacgtcgctttataggtggcaaagaaatccacaaattcgctgtgctctgggccatgatcctgatcgggtaaataatatccccagtacccctgacgtaccgactggatgaatggtttaataccgtcatttctcgcatgcagacgaccgccaaagcgacgacgcaccgtgttccagacataatcaaaaaccgggttgccctgattatggaacatcgctgccattttctgcccttgcgaggccatcagcatggcaggaatatcgacggcccaaccgtgcggcaccagaaagataactttctcgttattacgccgcatctcttcgatgatctccagcccttgccagtcaacgcgcggctgaattttctccggcccgcgtattgccaactcagccatcattgccatcgcttgcggcgcggtggcaaacatctcatcaacaatcgcttcgcgttcagcttcactacgttctggaaagcagagcgacagattgattaacgcacgacggcgtgagctttttcccagtcgtccggcaaaacgtcccagccgtgccagaatgggatcacggaactttggcggcgttaaagcgatacccgccatcgctgctacgcccagccatgctccccagtagcgcgggtggcgaaaggatttatcaaactcaggaatgtattcgctattattttttttcgtttccatgcttttccagtttcggataaggcaaaaatcaatctggtgatagtgtagcggcgcaacttgccccgcaccaaataaaaaaagccggtactgactgcgtaccggctgcgaatggatgttaattaatcaaaccgtagctgcggcacaatctctttggcctgtgccaggaattcgcgacgatcggagccggtcagcccttcggtacgcggcagttttgccgtcagcgggtttacggcctgctggtttatccatacttcatagtgcagatgcggcccggttgaacgtccggtattaccggaaagcgcgatacggtcgccacgtttcaccttctgtcccggtttcaccagaatcttgcgcaagtgcatataacgcgtggtgtagctgcgaccatgacgaatagctacataataacctgctgcaccactgcgtttggcaaccaccacttcaccgtcacccactgaaagcactggcgtaccttgtggcatggcgaaatcaacacctctgtgtggtgcaacgcgaccggtcaccggattagtacgacgcgggttaaagttagacgagatacggaactgtttcgccgtcgggaatcgcaagaatcctttcgccagaccagtaccgttacgatcgtagaatttgccatcttcagcgcggatagcgtaataatctttaccttctgaacgcaaacgtacgcccagcagctggctttgctcacgtttaccatcaagcatttctcgagacattaataccgcaaattcatcgccttttttcagtttgcggaaatccatttgccactgcatggctttaatcactgcgctcacttcggcgctggttaaaccggcgtttctggcgctggcaacaaagctccccccgacggtacctttcagcagattgttaacccactctccttgctgcatttcgctggtcattttaaaaccgttagcggcagtacggtcataggttcgggtttcacgacgagacacttcccaggtgaggcgctgcagttcgccgtccgcggttaatgtccaggagagttgttgaccgattttcaggttacgcaattctttgtcggccgcagccagttgggtgatatcacccatatcaataccatactgattgagaatgctgcttagcgtatcgccagtggaaacaacatattcatgcacgcccgcttcaccggcgattttgtcatccagttcgtcctgaggaatggcttcatcttcttgtgcagcttgatcaatcggctcactggcttcaggtaagagcgaacgaatttcgttctgttccagctcaatggttttgacaattggcgtggcatcgcggtgataaacatagggccgccagacagcgacggccagagtaagaacggtgagcgaccccaacataacgcggtgtggtcgcggtaaattattaaacgccagggcgacagagcgggctatctgttgcacgtaatcacttcctcattaatctcctttcaggcagctcgcatactggttggctaattgactcaggaattctgaatagcttgttttacccagtttgatattcgtccccaggggatccaacgttcccatacgaacggatgtccctcgtgcgacgctctcaacgaccgctggcctgaactgtggctcagcaaaaacgcaggttgctttttgctcaaccaactgtgttcttatttcatgtaaacgctgcgcgccaggttgaatctcagggttaacggtaaaatgaccaagcggtgtcagtccaaactgtttttcgaaatagccgtaagcatcgtgaaaaacgaaataacctttccccttgagcggcgcgagctcgttaccaacctgcgtttcggttgaggctaattgtgcctcaaaatccttcaggttggcgtcaagtttggctcgactttgcggcataagttccactaattttccatggattgcaaccgctgtagcccgcgctatctctggggaaagccaaagatgcatgttgaaatcgccgtgatggtgatcttcgtcacttttttccgcgtggtcgtgatcatcatcatcgccgtgaatacttttcatcagtagcggtttcacatcttcaagctgcgcaatcgttacctgcttcgcttctggtaatttacttaccggtttttgcataaacgcttccatctccgggccaacccaaacgactaagtccgcgttctgtaagcgttttacatccgatggacgcagtgaataatcatgttctgaagcgccgtcaggcagtaaaacctccgtttctgttaccccatcagcaatggcagaagcgatgaacccaacgggtttaagcgaagcgacaacggcggcatctgcggcctgtgttgcaccgccccagagagcggcggataatgctgcgaaaagaagcgtttttttatgtaacataatgcgaccaatcatcgtaatgaatatgagaagtgtgatattataacatttcatgactactgcaagactaaaattaacatgacaagtctggtttccctggaaaatgtctcggtttcttttggccaacgccgcgtcctctctgatgtgtcgctggaacttaaacctggaaaaattttgactttacttgggccaaatggcgcaggtaagtcgacactggtacgggtagtgctcgggctggtaacacccgatgaaggggttatcaagcgcaacggaaaactacgcatcggctatgtaccgcagaagctgtatctcgacaccacgttgccactgaccgtaaaccgttttttacgcttacgccctggcacacataaagaagatattttgcctgcactgaaacgtgtccaggccggccacctgattaacgcaccgatgcaaaagctctcgggtggcgaaacgcagcgtgtactgttagcgcgagcattgttaaatcgcccgcaattattagtgctggatgaacccactcaaggcgtggatgtaaatggccaggtggcgttatatgaccttattgaccagttgcgtcgcgaactggattgtggcgttttaatggtttctcacgatctgcatctggtgatggcaaaaaccgatgaagtgctgtgcctgaatcaccacatttgttgttccggcacaccggaagttgtttccctgcatccggagtttatttcaatgtttggtcctcgtggtgctgaacaactgggtatctatcgccatcatcataatcatcgtcacgatttacagggacgaattgttttgcgtcggggaaatgatcgctcatgattgaattattatttcccggttggttagccgggatcatgctcgcctgtgccgcgggtccgctgggttcgtttgtagtctggcgtcgtatgtcttatttcggtgatacgctggctcatgcctcattacttggcgtcgcgtttggtttgttgctggacgtgaatccattctatgcggtgattgccgttacgctgctgctggcgggcggtctggtatggctggagaagcgtccacagctggcgatcgacacgttattagggattatggcgcacagtgccctgtcgctgggcctggtggtcgttagtctgatgtctaatattcgtgttgatttgatggcttacttgttcggtgatttgctggcagtgacgccggaagatctcatctccatcgccattggcgtggtcatcgtggtggctattttgttctggcaatggcgcaatttgctgtcgatgacgattagcccggatctggcgtttgttgatggtgtgaaattacagcgcgtgaaattgttattgatgctggtgacggcattgacgattggtgtagcgatgaaatttgtcggtgcgttgattattacttcgttgctgattattcctgcagctactgcgcgtcgctttgcccgcacgccggaacagatggctggtgtcgctgttttggtggggatggtggcagtgactggcggtttaaccttttccgcattttacgatacgccggcgggtccgtcggtagtgctatgtgcggcactgttatttattctcagtatgatgaaaaagcaggccagttaatctgtcgctgaacacatttgtcggatgcggcgcgagcgccttatccgacctacggttcggtatctctggtagtcctggtaagacgcgaacagcgtcgcatcaggcatattgccagtgccggatgcggcgcgagcgaccaatccgacttacggcatttctggcggcgttatgccaaagtgattccacgcccgcgtcgtcgccatacgcccacgcggtgtacgctgcaaaaagccttgctgaatcaaataaggttccagcacatcctcaatggtttcacgttcttcgccaatggctgccgccaggttatccagacctacaggtccaccaaagaacttatcgattaccgccagcaacaatttgcggtccatataatcgaaaccttcagcatcgacattcaacatatccagcgcctgagcagcgatatctgccgagatggtgccatcgtgcttcacttcggcgaaatcacgcactcgacgcagcagacggttggcaatgcgcggcgtaccgcgagcgcgacgagcaacttccagcgcgccgtcatcactcatctcaagccccataaagcgtgcgctgcgactgacgatatattgcagatccggcacctgataaaactccagacgttgcacaataccaaaacggtcgcgcaacggtgatgtcagcgaacctgcgcgcgtggttgcaccaatcagggtaaacggcggcaaatcaattttaatggagcgtgccgccggaccttcaccaatcatgatatccagttggtagtcttccattgccgggtacagcacttcttcaacaactggcgatagacggtggatctcatcaataaacagcacgtcatgcggttcaaggttagtgagcatcgcagccaaatcgcccgccttttccagcaccggaccagaagtcgtgcgtaaattaacgcccatttcattggcgacaatgttggcaagcgtagttttacccaaccccggaggaccaaaaatcaacaaatgatcgagggcatcgccgcgcagtttcgctgctttgatgaaaatctccatctgtgaacgaacctgcggctgaccaacatactcttccagtaatttggggcgaatggcgcgatctgctacatcttccggcaaagtggtaccggcagaaatcagacggtctgcttcaatcatcctttacctcataacgcggcgcgtagggcttcgcgaattaaagtttcactgctggcgtcagggcgagcgattttgctcaccatgcggcttgcttcttgtggtttatagcccagcgccaccagcgcggcaaccgcttcttgttcagcatcgtcggtcgccgggctggcaggagacgtgagtaccaggtcggcggctggcgtaaagagatcgccatgcaaacctttaaatcggtctttcatttcaacaatcaagcgttcggcggtttttttgccaatacccggcagtttcaccagtgcccccacttcttcacgctcaacggcattaacgaactgctgcgctgacattccggagaggatcgccagcgccaacttcgggccgacgccgttggttttgatcaactctttgaacaatgtgcgctcttgtttattgttaaaaccgtacagcagttgcgcgtcttcacgcaccacaaagtgggtgaaaacgatcgcttcctgacccgcttcagggagttcataaaaacaggtcatcggcatatgcacttcatagcctacgccgcccacttcaattaacaccagcgggggttgtttttcaatgatgatgcctctgagtctgcctatcacatgacgctcctgcgtaatgaatcaaagataatgctgtatgataaaaaaatgctggatagatatccagcgaaggatgaagaaaacttgcgaggtgtctcgatgaactgaaaaatggcacagtataatttattctacaggttatattggaagcaaatattttaatattacatattcagtgaagaaatgcgtaataaaaatatacattgcgcctcctgaaaaaataaattttttatgctattacgtatatttgtatctatttcaatggaatgacaacgtgaatattaattaccctgctgaatatgaaattggagatatcgtctttacatgtataggtgctgccttatttggtcaaatatcagctgcatcaaattgctggagtaatcacgtcgggatcattatcggtcataacggtgaagacttcctggttgcagaaagccgggttcccctttcaaccatcaccacgctatctcgttttattaaacgttcgtctaatcaacgctatgctataaagcgattagacgctgggctgacagaacgacaaaaacaacgaattgttgaacaggttccctcccggctacgcaaactttaccacaccggttttaaatacgaatcttcgcgccagttctgttcaaaatttgtttttgatatttataaagaagcgctatgtattccggtgggtgaaatagagacgtttggagaattgttaaatagcaatccgaatgcaaaactcactttctggaaattctggttcctgggttctattccgtgggagcgtaaaaccgtcacgccagccagtttgtggcatcatccgggtttggtgttgattcatgcggagggagtggaaacgcctcagccggaactgaccgaggcggtataacttaacgcagtcgccctctcgccaggttcagccgcgattcgctcatctgcatcgcattctgactaacgtggcagtgggtgatagcaatcgccagcgcatcggcggcatccgcctgtggattagcgggcagtttcagcaaggtgcggaccatatgctgcacctggcttttttcggcactgccaatacctaccaccgtttgctttacctgacgtgccgcgtattcaaatactggcaactcctgattcaccgccgccacaatcgccacgccgcgcgcctggcccagtttcagggctgagtcagcgttctttgccataaagacttgttcaatggcgaaataatcaggctggaactgggtgatgatttccgtcacgcccgcatagatgagtttcagacgagacggtaaatcatccactttggtgcggatgcatccgctacccaggtaggacagttgcctacctacctggcggatgacgccgtagccggtcacgcgcgaacccggatcaatgccgagaataatagccatcacgcgtctccgttttgctgtttagcaggcctcatcagagagtcgctgcgacctcatcagagatttcaccgttatggtaaacttcctgcacgtcgtcgcaatcttccagcatatcgatcagacgcatcagtttcggtgcggtttctgcatccatatcagctttggtagacgggatcatggaaacttccgcgctgtctgctttcagacctgccgcttccagagcgtcgcgcactttacccatttcttcccatgcagtgtagacatcaatcgcgccgtcatcataggtcacaacgtcttcagcacctgcttccagtgctgcttccatgatggtgtcttcatcgcctttctcgaaggagatcacgccttttttgctgaacagataggcaacggaaccatcagtaccgaggttaccgccacatttgctaaatgcatgacgcacttcagcaacggtacggttgcggttgtcagacagacattcaatcatgattgccgtgccgccaggaccgtaaccttcgtagatgatggtttccatgtttgcatcatcatcaccgcccacaccacgtgcaattgcgcggttcagtgtgtcacgggtcatgttgttagacagtgctttatccaccgccgcacgcagacgcgggttagcgtccggatcgccaccgcccagcttagccgcggttaccagctcacgaatgattttagtgaagattttaccgcgcttagcatcctgcgcagctttacgatgtctggtgttggcccatttactatgacctgccataaaaatatctccagatagccctgcctgttcaggcagcgttaattacaaactgttcaatcgcctgccggttgctccaggacttagtgagcgccgccgcagcaggcgcatcaagccacttgtaagccagatgttcagtgaaaacgatctgccgctcgtgcggaagcgcaagacagaaccatgattccgtattacgcgtcacgcccggcgcatagcgatgacgtaaatgtgaaaaaatttcaaactctaccgtgcgctgacagtcaattaaggtcagttgttcagcgacaacatcaatggtgacctcttcctttacttcgcgcatggcagcttgcggcgcggtttcaccctcttccacgctgccggttaccgactgccagaaatcgggatcgtcacgccgctgcaacatcagcacccgtttcgtatcttgtgcgtagatgaccactaagatcgaaacgggacgcttatacactttatccttcacgctgcctcttcgttgactgccttcgctcatcccattcacatagttatctatgctcatgggagttcactcagttgccgcctcgatgcaacgcgaatgatttcgtgtatttgagtcatatcagttattctcagccttcttcacaacctgaatgctcagctcagccagtgcagtcgggttagcaaagctcggtgcttcagtcatcagacacgctgccgccgtggttttcgggaaggcgataacgtcacggatattgtcggtgccggtcagcagcatggtcagacggtcaagaccgaatgccagacctgcgtgcggcggagtaccgtatttcagagcgtcgagcaggaagccgaatttctcgcgctgttcctcttcgttgatacccagaataccaaacaccgtctgctgcatatcaccattatggatacgtactgaaccaccgcccacttcgtaaccattgatgaccatatcgtaagcgttcgccaccgcattttccggtgcagctttcagttctgcagccgtcatatctttcggtgaggtgaacggatggtgcattgccgtcaggccgccttcaccgtcgtcttcaaacatcgggaagtcgataacccacagcggtgcccatttgctttcgtcggtcagaccaaggtctttacccactttcaggcgcagtgcacccatcgcgtcggcaacaattttcttgttgtcggcaccgaagaaaatcatatcgccatcttgcgcggcagtacgatccaggatgtcttcgatgatttctgcattaaggaacttcgctaccgggctgttgataccttccagacctttcgcgcgttcgttaactttgatgtaagccagacctttcgcgccgtagattttaacgaagttaccgtattcgtcgatctgcttacgggtcagcgatgcgccgcccggaacgcgcagagccgctacgcgacctttcggatcgttcgccggacctgcaaatacagcaaactcaacagatttcagcagatcagcaacgtcagtcagttccatcgggttacgcagatccggtttatcagaaccataacggcgttctgcttccgcaaaggtcattaccgggaaatcgcccagatccacacccttcacttccagccacagatgacgcaccagcgcttccatcacttcacgcacttgcggcgcggtcatgaaagaagtttccacatcgatctgagtaaattcaggctgacggtcagcacgcaggtcttcgtcacggaagcatttaacgatctgatagtaacggtcaaaaccggacatcatcagcagctgtttgaacaactgcggggattgcggcagtgcgtagaatttacctttgtgcacacgagaaggcaccaggtagtcacgcgcgccttccggcgtggctttggtcagcatcggagtttcgatgtcgaggaagccgtggtcatccataaaacggcgcaccaggctggtgattttagcgcgggttttcaggcgctgagccatttccggacgacgcaggtcgaggtagcggtatttcagacgcgcttcttcggtgttgacgtggttagagtcaagcggcagaacatctgcgcggttgatgatagtcagcgaggacgccagcacttcgatttcgccggtcgccatatcgcggttaatatttttttcgtcacgcgcacgtacggtgcccgtgacctgaatgcagaactcattacgcagttcagaggccagctttaacgcgtccgcacgatccggatcgaaaaatacctgcacgataccttcgcggtcgcgcatatcgatgaagatcaggctaccaagatcacgacgacggttgacccaaccacacagagtcacctgctgccccacgtgggacaaacggagctgtccacaatattctgtacgcatgagatatcccttaacttagctgccggcggatgccccctgctgcgcaggtgaccaagtcgcagcgttagctgtatgtcacaactgaatgaaaaaaggcggctattatactggaaattctgccgcaccgtaagagcctggcccgcgctggaacgcctcgttaccactttatatcgggcctgaaatcagactctacgccagtttgctataaaggtgttgcccgaactcataaaaattaacaaaatttgtcgttccgacatcggctaatcgcattaaggtgtgaggcacgattttgttttttcaggagtcattatgcttgaacttaatgctaaaaccactgcgctggtggtgatcgatttacaagaaggcatcttaccttttgccggtggtccacatactgccgatgaggtagttaatcgcgccgggaagctggcggcgaaatttcgcgccagcggtcagcccgtgtttctggtgcgcgttggctggtctgccgattacgctgaagcattaaaacagccggtcgatgcaccctcaccggctaaagtgttgcccgaaaattggtggcaacatcctgctgcattaggtgcaaccgacagcgatatcgaaatcatcaaacgtcaatggggtgcgttttacggtacggatctggagttgcaattacgccgccgaggtatcgatacaatagtgttatgtgggatctcgaccaatatcggtgttgaatccaccgcccgcaatgcctgggaacttggctttaatctggtgattgccgaagacgcctgtagtgccgccagcgccgagcagcacaataacagtatcaaccatatctacccgcgcatcgcccgtgtgcgtagcgtggaagagatcctcaacgcgttatgatttacatcggtctaccgcaatggtcgcatcctaaatgggtgcggttggggatcaccagccttgaagagtatgcccgccactttaactgcgtggagggcaacaccacgctttacgccctgccgaaacccgaggttgtcctgcgctggcgtgagcagaccacagatgacttccgcttctgttttaagtttccggcgaccatttcgcatcaggcagcattacggcattgcgatgatttagtgactgaatttttgacccgcatgtcaccgttggctccgcgcattgggcaatactggctgcaactgcctgccacattcggcccacgggagctgcctgcgctttggcattttctcgattctcttcctggcgaatttaattatggcgtggaagtccgccatccacagtttttcgccaaaggagaagaggaacaaacgcttaatcgcggtttacatcagcgcggcgttaatcgggtgattttagacagccgcccggttcatgcagcacgtccacacagtgaagctattcgcgacgctcaacgaaaaaaacctaaagttccggtacatgctgtactgacggcgacaaatccgctgatccgttttatcggtagtgatgatatgacgcaaaaccgggaattatttcaggtctggttacaaaaattagcgcagtggcatcagaccactacgccttatctttttttacatacgccagacattgcccaggcaccggaactggtacataccctgtgggaagacttacgtaaaacgcttccagagatcggagcagttccggctattccacagcaatcttctcttttctgaatttgccacctatcatagacaggtgccatcggccattttaaagggagtttgtatggtaagcgcgctgtacgccgttttaagtgcgttgttattaatgaagttctcttttgatgtcgttcgcctgcgaatgcagtaccgcgttgcctatggcgacggcggttttagcgaactgcaaagcgctattcgcattcatggtaacgcggtggaatatattcccatcgcgattgtgctgatgctgtttatggaaatgaatggcgcagaaacctggatggtgcatatttgcggcatcgttttgcttgctggtcgtctgatgcattattacggttttcatcaccgtctgttccgctggcgacgttccggcatgagcgccacctggtgtgcgctgttgctgatggtgctggcgaatctttggtatatgccctgggagttggttttctccctgcgttagcgcacaatacgccactttctttttcccggatttttacgttatgtctcaccgcgacacgctattttctgcccctatcgccagactgggcgactggacctttgatgaacgggtagctgaagtcttcccggatatgatccagcgttccgtacccggctattccaatattatttccatgattggtatgttagccgagcgcttcgttcaacctggtacgcaggtttacgatctgggttgttctctgggcgcggcgacgctctcggtgcgtcgcaacattcatcatgataattgcaaaattattgccatcgacaactccccggcgatgattgaacgctgccgtcgtcatattgacgcctataaagcccctacgccagtagacgtcattgaaggtgatattcgcgatatcgccattgaaaacgcatcgatggtggtgctgaattttaccctgcaattcctggaaccttccgagcgccaggcgttactggataaaatttatcaagggctgaaccccggcggcgcgctggtgctttcggaaaaattcagtttcgaagatgccaaagttggtgaactgttgttcaacatgcaccacgactttaaacgtgccaacggttacagcgaactggagatcagccagaagcgcagcatgctggaaaacgtgatgctgaccgattccgtggaaacccataaagcacgcctgcataacgccggttttgagcatagtgagctgtggttccagtgctttaactttggttcactggtggcattaaaagcagaggacgctgcatgatcgactttggtaacttttattctctgattgccaaaaatcatctttcacactggctcgaaacgctgcccgcgcagattgctaactggcagcgcgagcagcagcacgggttgtttaagcagtggtcaaatgcggtggagtttctacctgaaattaaaccgtatcgtcttgatttattgcatagcgttacggcagaaagcgaagagccactgagcgcagggcaaattaaacgcattgaaacgctgatgcgcaacctgatgccgtggcgcaaagggccgttctcactgtatggcgtcaacatcgataccgaatggcgttccgactggaaatgggatcgtgttctgccccatctttctgatttaaccggacgcaccattctggatgtcggctgcggcagcggttatcacatgtggcgcatgattggcgcaggcgcgcacctcgcggtggggatcgaccctacgcaactgtttctgtgccagtttgaagcggtgcgtaaactactgggtaatgatcagcgcgcgcatttgttaccgttaggtattgaacaacttccggcactgaaagcctttgataccgtcttttcgatgggcgtgctttaccatcgccgttcaccgctggagcatctatggcagttgaaagatcaactggtcaatgaaggtgaactggtgctggaaacgctggttattgatggtgatgagaacacggtgctggtaccaggcgatcgttacgcgcaaatgcgtaatgtctatttcatcccttccgcgctggcgctgaaaaactggctgaagaagtgtggttttgtagatatccgcattgcggatgtgagcgttaccaccacagaagagcagcgacgcaccgaatggatggttaccgaatcgctggccgatttcctcgacccacatgatccgggtaaaacggtggaaggttatccggcacctaaacgcgcggtgctgattgcgcgcaagccgtaaaggtctggtattactgccggatgcggcgtgaacgccttatccggcctacaaaaccttgctaattcaatatattgcagggactatgtaggcctgataagcatagcgcatcaggcagctttacgtttgcataacctcagcgcccgtttccgggcgctattcacgtcttacgcctgaacagctggctgatcaaacgccgttaacttcggtgcattgcccgtatatttttcgatatacaccaacgctgagttaccggcacaggcatttgccagctgcgagctggggatatccgccgttaacacgttcgcactgccgtttttacacaagccattttccagatctggccatgcaccttcatgcacgcataccacgccttttttgatcccgtcagtcaccaccgcgcctgtcaaaatctgaccacgtttgttccagacacgcaccagatcgccattcgcaataccaaagcgtgcagcatcttcggtgtgaatagtgattggttcacgatcggcgatcgcatattttttacgcagttccgcatagttaagctgactgtgtaaacggtgtgccggatgtgcggtcagaagctgtaactgcttctcgtcggcggtacctttccattcatcaggagccagccaggttgggtgtgccgggcaatccttatagccaaatttttccaacgtttttgaatagatttcaattttgccgcttggcgtacccagcgcatttttcaccggatcggcgcggaaatcaccataacgaacgtactgttcgttcttctcgctgcggcgcatttcgatcagtttattttgctgccagaaggcattaaacattggcatagtgacgcgttgcgcacgggcacctttctgagcggcatcatagaaaaatttcagccacgccatttcatctttaccttcggtatagatctcttttccgccaggtttgagtaattccgcaagatcggcaaacacgtcaaaatcgttacgcgcttcaaattgcggagcaacagcctgcttcatcggcacaatatgctggttgctgtaatcaccggtcatcgtcaagtcattgcgctcaaacgatgtggtgatcggtaatacgatatctgcgtgtttggctgctgcggtccagtagcattcagaaacgacgatcatctccggtttctgccatgctttaatcagacgattagtatcctggtgatgggtaaagttaccgccacccgcccaccagatcattttgatattcggatacgtttgttctttaccgttatgctgatatttgccgccaggattttccagcgcatcgacgatacgggcaacaggaatcgccgtcattccgccatcatcagcggcctcgctggcatgtccggcaatcgccgcagacatttccggcagcacgccgccaacacgcgtcgggttgccaccgttggagtaatgataagagaaaccaaaaccgccgcccggtgtaccaatctgccctaacatcgccgccagcgtcaccagcatccagtgtttctgttcaccatattgctggcgctgaattccccagcctgccatcagcattgtgcgattcgccgccatcagttcagcgagtttgactatctgcgcttccggtacgccagtaatttccgccgcccagaccgcgctcttcggcgtattatcgctcttacctgtcagatactcttcaaactgcggatacccggtagtgtatttttcaaggaacactttatcgtgtttgccttgtgtcatcagggtatgcgcaatccctaacatcagtgccacgtcggtgcccatattcggcgcgatccaggtggcattatcgtcaaagaattcgatggtttcggagcggataggatcaatggcaatcactggtttgccagattttttcagctgatggaagtattccagcccttgctcatcggtactgctccaggcaatttttaaggtattcagcgggttcattccccacagcaccacaacctggctgttttccagaatcagcggccaggaggtctgctgttcatacacctctacagaaccgaccacatgcggcatgatcacctgtgctgccccggttgaataatcgccgctatgcccggaataaccgcccgccaggttcatataacgttgcagtaaggtttgcgctttatgcaacacgccagaagagcgccagccgtaagatccggcaaaaatggccgatggtccgttagctttacgaatacgatcatgttgctcatgaatcagttttaatgcctgttcccagctcacctgtacataggtatcttcgccacgacctttcgccggttgcagtggattatcgagatagctttttctcaccatcggatgctgaatacgcgccgtggtgtgtacctgatccgccgccgtagactgtaaggaattcggtatggttttcgccagcgcgcctgttgaagaaacaatcttgccgtccttcacttctacgttcatcgctccccaacgtcccgcggtgaggattttaccgcccttctcttctgcccatgcggggagcggtgctgccgatgtcaccaccagcgctccagcggcaataccgctgtgtttaataaattcacgtcttgttaatgtcataacttcctccctgatcaacgaggatcactgtttctcggtaatatctttggcgttgtactggaaataccgcgttaaaatgtccagttcgttttcgctcatgctggttcgtgcccccattcctttggcaatggacggccacgcattgacggtgtaatggtcggcggcaataggggcatgacaaccagcgcaataggtatcgtcaagtttttcagcgtattgccatagcggtttacggtccgctaatgcgggatcggtaagcgcaccctgtaaagacgcctgacgccattgattgccgtattcgtcagcctgccattccccgtttacagtgagcgccttgataccttcttcacttaatgtggctagcgccagccgttgacctgccgccaggtagagcgtgttttcactgccctgcatttgataaccctgcaacagaacgatcggctgtttgccactggcatcaacgacggtgagatcggttccaggattcacggtagccagctcgcctatgtgagaagttttgaaaggataaatatgtgcgccattagtaactgaagtagcggcctgactttccagctcatgcgccgcgttgtcatccatttttatttctggcggaaaatgggcaatgcctttatgacaatcgatacaggtttcgctgtccttttgtgctttgttatgcattttctgcgcagattcactttgcgaggcaatatccatggcatcaaaagaatggcaactacggcacgttgcagagtcagtggcttttaattctttccatactgtttcggccatttcctggcgatgagcttcgaacttatcgtcactgtctattttgccgctaacaaattcatgataaatatctttagatgcctttaatttagcaaataaataatccatccctgactttggaatatggcaatcggcacattccgcacgtatccctttctggttcgaaaagtggacagttccctgatattcctcaaaaggtttactcatcgagtggcaggaaaggcaaaatgctgtatccgacgttttatgtaaggctttttgcgccagcaataacccgccgccaccaaccacaaccgctatcagcaaaaacaataacccaatgcgttttttccctcgcatagattcctctaattaaattactggacaccgaaatcattgcataattaaatatacaacgaattaaccgcttgcataattaggcacaacactgcctgaaacaatcgataaagaatatgatttattacaatgtaatcattaattgctaaggaataacccagttgctatttagaatatatatttatcagttttagtaatttaaatcccataattaatgtgaatatatacaatatttttagcacaacgctatgcgcactgtcacccgctcaacagatcacggttatcgttcgttttttatactgttcagggataaaaaaaggcccctgttgaaattgcaggggcctggtacgagcaagcatcatattgggcgacatgatgcaacggtaaaaatcatttggcctgatggcgttcaatgattcctttcatttcagcaaccgccgccccgtctacgatataacgcgaatactcgtccgcgtgttcatctgatgacatggacaatccttgattacgataacgcatcggtgaggcttgccacgctcccgcggagctatggacttccagcactccggcatcgaggaagtggtgcaggttttctgcacggactcctgctccggccataatgattggagcatcacgatgggcaataagttccataatttttgataaaccttgcagtgcgtctgatttttgccctgatgtcagtacccgggcaatgcccaattccgcaagattattgagtgtatataaagggttagcgcacatatcgaaggcgcgatgaaaagtcactgccagcggaccggcagcagccattattttttccattcgtggcatatcgacattcccgtcaacatcgagaacgcccgtcaccagtccaggaaaacctaattcgcggaccgtgcgcacatcctcaagaatggcggcaaactcaccgtcgctgtagcaaaaatcaccaccgcgtgggcgaattatcggatgcacagggatcgtcacccgctggcgcacggatttcagtacacccaacgacggcgttaagcccccctcttttggggctgcgcataattcaactctgtctgcgccgttttgctgcgccgttagtgcacattccatgctgtaacagcaaatttccagtaatgccatttttactccttaattacgccgactgctcgctggcaacgatctcttcaatggaccacggatgaaacttaatagttgttttgccatcggtgaccgccagcgtcggattcggtaatcgctcatgctcaccttttggcgaactggttttcactgagatccccggtaggctgagtccttcatcagaaagcaatgccagcgcacgggcattcagcgtttctggatcacccggcagaacgatttcaatatgttcccaaccttcgtgtgggtaacgtttttccccgggccacggtagctccacaatagaaaactgccagtgcgcaacctgtaccggttcatgcaatttaaacagacaaatcggtctgccattgatcatattttctgacaaaagctcgccacactgttcaaacccgcgacgccagcgttcagcagtggcgttttgatggcaacgcaaagaaatgtgatcggcagtcagcggagtgatattcaaccccagacggcgggaaagttcatctaatgcgtggataaatcgcggtaaatccgatgcaatatcctgcagctcgtcgatagattgccagttcgccataatcactcttcgtctttcagtaaaagcgttaatttaccctgttgccctgtgccaaccaaccgctgatttcacgccgcttctgatgcaatagtgaaaacggcaatacgccacgcgcacgttgctgacgaaaacagccatttgcagtatactcccgccctaatttctttaactggtgcgggcaatttttgctcgcttcatcaatgtaaggtattccggtgaatattcaggctcttctctcagaaaaagtccgtcaggccatgattgcggcaggcgcgcctgcggattgcgaaccgcaggttcgtcagtcagcaaaagttcagttcggcgactatcaggctaacggcatgatggcagttgctaaaaaactgggtatggcaccgcgacaattagcagagcaggtgctgactcatctggatcttaacggtatcgccagcaaagttgagatcgccggtccaggctttatcaacattttccttgatccggcattcctggctgaacatgttcagcaggcgctggcgtccgatcgtctcggtgttgctacgccagaaaaacagaccattgtggttgactactctgcgccaaacgtggcgaaagagatgcatgtcggtcacctgcgctctaccattattggtgacgcagcagtgcgtactctggagttcctcggtcacaaagtgattcgcgcaaaccacgtcggcgactggggcactcagttcggtatgctgattgcatggctggaaaagcagcagcaggaaaacgccggtgaaatggagctggctgaccttgaaggtttctaccgcgatgcgaaaaagcattacgatgaagatgaagagttcgccgagcgcgcacgtaactacgtggtaaaactgcaaagcggtgacgaatatttccgcgagatgtggcgcaaactggtcgacatcaccatgacgcagaaccagatcacctacgatcgtctcaacgtgacgctgacccgtgatgacgtgatgggcgaaagcctctacaacccgatgctgccaggaattgtggcggatctcaaagccaaaggtctggcagtagaaagcgaaggggcgaccgtcgtattccttgatgagtttaaaaacaaggaaggcgaaccgatgggcgtgatcattcagaagaaagatggcggctatctctacaccaccactgatatcgcctgtgcgaaatatcgttatgaaacactgcatgccgatcgcgtgctgtattacatcgactcccgtcagcatcaacacctgatgcaggcatgggcgatcgtccgtaaagcaggctatgtaccggaatccgtaccgctggaacaccacatgttcggcatgatgctgggtaaagacggcaaaccgttcaaaacccgcgcgggtggtacagtgaaactggccgatctgctggatgaagccctggaacgtgcacgccgtctggtggcagaaaagaacccggatatgccagccgacgagctggaaaaactggctaacgcggttggtattggtgcggtgaaatatgcggatctctccaaaaaccgcaccacggactacatcttcgactgggacaacatgctggcgtttgagggtaataccgcgccatacatgcagtatgcatacacgcgtgtattgtccgtgttccgtaaagcagaaattgacgaagagcaactggctgcagctccggttatcatccgtgaagatcgtgaagcgcaactggcagctcgcctgctgcagtttgaagaaaccctcaccgtggttgcccgtgaaggcacgccgcatgtaatgtgtgcttacctgtacgatctggccggtctgttctctggcttctacgagcactgcccgatcctcagcgcagaaaacgaagaagtgcgtaacagccgtctaaaactggcacaactgacggcgaagacgctgaagctgggtctggatacgctgggtattgagactgtagagcgtatgtaatcgatttttcgtgagagtgaagcctgatcagggttagccgatcaggcttttttattgccatctaaatgtattctgaaaatggacatgccattgttttctcactgttggataagaggccagaagcgtaatatccggccccagggaaacgataacggttgaatttaaggaataccgcagtgtttaaatttcttgtattaacattaggcattatctcttgccaggcttacgcagaagatacggttatagtaaacgaccatgacatttcagccatcaaagattgttggcaaaaaaattcagatgatgatactgacgttaacgtgatcaaatcatgcctgcgacaagaatacaatctcgtcgatgcgcaattaaataaagcctatggtgaagcttatcgttatatagaacaagtgccacgcacaggtgtaaaaaaacctgataccgaacaacttaacttgcttaaaaaatcacagcgagcctggctggattttagggacaaagaatgtgaattaatcctttcaaatgaggacgttcaggatttaagtgacccttattctgaatcagaatggctctcatgtatgatcatacagaccaatacgcgaactcgccagttgcagctataccgtaactctgaagatttttatccaagccctttgacaagaggataattcacatctttttggcatgttttgttgcaagctattcctgataaataattgcaacaagacatcgagcctttttcactgagttattaaacatactcgcgagcgcgtaatttttttgtccttcagcgataattcacaatcacttcattacgttgtacctttagcggtggaattaaccgcccaccgcctggcacttcccagataaatcgcaacggttctgctgccgctataccggaaaaggccacggtggttccgctctgcccctctaattcgacacaacgagattgcgaacacaagcgaacccgcagtcctgaaggtgtcgggccgataagctgataacgccacgctaccagcgtcatcaatcctgaagcaggttgtcgcgtagaaagaggcgcagacgacatcgactcaccgcgatgatttagcgtaattcctacactacttgcctgccacatcccctccccggcggcttgcaccagcagcggaaacaataatattgctaataaggttctcattatttgccgccaattgtcgccgtcatgcggatatgtcggttatcagacagttccagattcgacaggaccactaactgcggcaagctgcggcgcaggaagcgagacaataatggtcgcagcgcgtggttcaccaacaatactggcggcgcacccagcatctcctgacgggatagcgcttcctgagtttgcgccagtaaacgatccgccagccctggctccagtcctcccccgccctgcagcgcctgtagtaacaaacgttccagcggtgtatcgaggccaataacatggacttcatctttgccaggaaaccactgctgggtaatcgcccgtcccaacgccacgcgcacgacggcggttaattcatgtggatcgctttggatgggcgcatgttccgccagcgtttcgagaatggtgcgcatatcgcgaatcggtactttttcatcgaggagattttgcagcactttatgcagtgtggtgagcgtgacgacgccaggaacgagatcttccgtcagctttggcatctcctgggcgacgcgatccaacagctgttgcgcctcctgacgaccaaacagctctgcggcatgctggctaatgaggtggttaagatgcgttgctaccaccgtgctggcctcaaccactgtgtacccctgaatctgcgcctgttcttttagcgcactttcaatccagatagcattcaggccaaatgccggatcgacggtcgcctcaccaggtaacgtcccggcagcggttccagggttaatcgccagccagcgccccggataagcatcaccactgccaatctccacgcctttcatcaaaatgcgatagcgggcaggttgcagatccatattgtcgcgaatgtgcaccactggcggcagaaatcccatctcctgggcaaatttcttgcggatactgcgtatacggcccaacaactcaccatcctgctggaaatcgaccatcgggatcagtcgataacccacttccattcccagagaatcttccagttgtacatcgttccacgtcgcttcgacaacggtattattctctgccatttttaccggtttgggttcggcaggcgctttttgttcgcgtccgcgtatccaccaggccagcccgagcaatccggcagtgaacagcaaaaataccaggttcggcattccaggcaccaggccgagtaaaccgagcacggcggcgcttaacaacataacgcttgggttactgaaaagctgattcaccatctgctcgccaacatcctgatcggtgctgacacgcgtaacgatgacccccgcggcggtagaaatcaccagcgccggaatttgtgccaccagaccgtcgccaatggtcaatagcgtataactttccgccgcgtgtcccatgctcatgccatgttgcagcacgccgaccagcaacccgccgacaatgttaatgaccatgatgaggatcccggcgatggcatcgccgcgaacaaacttacttgccccgtccattgagccgtaaaaatcggcttcctgagtcacttcggagcggcgttttttcgcctcatcttcaccaatcaatccggcgttaaggtcggcgtcaatcgccatctgcttacccggcataccatcgagaacaaagcgcgcacccacttctgcgatacgcccggcacctttggtaatgaccataaagttgatgatcacgagaatgacaaacaccacgataccgatatcgaaattgccaccaacgaggaagtgaccgaacgcttcgaccaccttccctgccgccgccgcgccggtatgcccttccattaaaatgatacgggttgaagccacgttaagtgccagacgcaacagcgtggtaaacaacagaatggtcggaaacgcagcaaactcaagcgtgcgctgggtaaacatcgccaccagcaacaccatgatcgacaaggcaatattgaaggtaaacaacaggtcgagtatgaatgcgggcagtggcagcaccatcatcgacaagatcaacaggatcaaaatcggtccggcaaggatctgccattgtgtcgatttcaggtttgcgggcaggcgcagcatcgcggccagattactcatgggtcggtttctcgttaataaaatccagggcttccggcaccggaagatgagtaggttgtacagggcgctgtccaccagccagacgccagcgtttcagttgccagacccaggccagcacttccgccaccgcggcgtacagttgacccgggatttgttgaccaatctccgcatgtcgatacagcgctcgcgccagcggcggcgcttcaagcgtcgggacgttattttcagcgccaatttcacgaatgcgcagcgcgaccagccctgcacctttagcgaccactttcggtgcgctcattttgttttcgtcatactgcaacgctaccgaatagtgggtcgggttattgacaatgacatccgctttcggcacatcggccatcatccgacgccgtgcagcagctcgctgcatctgacggatccgccctttaacatgagggtcaccttcgctttgtttgaactcatcacgaatatcctgccgtgacatacgcagctttttcaggtggctgaatatttggaaaaagacgtcaaatcccaccattggaatgacaccaagcaccaccagcagtgcgcatagccctaccaaatccatcgcattacccatggcggtaatcggagactgggccattaagcgcatcatctgcggccagtgatgccagagaaaaaaccccgtcacgctaccaaccaggatggttttcaaaattgccttaagcaactccgcgccagtctgagccgagaacatccgtttaatgcccggtagcgggttgagtttggaaaacttcggctgcaaggatttgccgctaaataccagccctcccagcatgaccggagaaatgagcgccaccagcaccacgccgctaatcagcggcagcagcgccagcatggcttctctgatcaacagaataatctgcccgaggatcagattcgggtcattgataatactgtgatcaaaatgcagcccagcggagagcatgcccgacaatcgacgggccagcgacacaccgccaaaccagataacactaacgcccaccagcaaaatcagcagtgaggtcagttcacgggaacgcgggatttgcccctcttcccgcgctttttctagtcggtgaggtgtgggggcttctgttttgtcgtcgctctcgtcagacacgtcgccaatcctggaaagagtattaagcgtaaatgatgccagagcgcaaagcgttcaatggtttgagtaaggggcaaaacaggcgggatttagggcttttgctgccacacatcaagcatagtgtgcgtttgtcggatgcggcgtcatcgccttatcagaccgcctgatatgacgtggtcacgccacatcaggcaatacaaatcaaaatccaagactatccaacaaatcgtccacctgatcctgactggctaccacaccggctttgctggtatcgacctgaggtccattaagcaaactttggttttcacgttttggacgcgactcctgttccgggatgttttccaacagcaccatcagcaactggcgttcgatctcctgaatgacatccatcatccgcttaataacctgcccggtgagatcctgaaaatcctgcgccatcatgatttccagcagttgcgcgttagtaaagctggtatgcgcgggtacatctgccagaaattgtcgcgtatctgttaccagttcacgggcgtcggcaaggtcaatcggatcggcaaaccagtcatcccaacgttgggttaacgcttttgctgatttctccatttgatcctgatgcggttgtgacgcctcaacactgttcagcgcccgctccgcagcctgggcggtcatctgcacaacatagtacaaacgatcgcgcgcatccgggatggcttccgccgcttcggcaatggcctgatccagccccagttcccgcaaactgtcgcgcagcatacgcgtcaggctgccgatgcgtgcaatgatatcgccagctgaatgctcgtcagcaggtttgattgatggttgcatcatagtcgcatcctcacatgcccagtttctcaaagattttgttgagtttttcctccagcgtcgcggcggtaaatggcttcaccacatagccactggcccccgcttgcgccgcagcaataatattttctttcttcgcttctgcagtcaccattaacactggcaatgccgacatcccgccatctgcacgaatcgttttcagcaactccaggccatccatgttgggcatgttccagtcggagataacaaatccataaccgcctgcctgcaacttattgagagcgtcgacgccatcttccgcttcctcaacattattgaatcccagctctttcagcaggttacgcactatgcgtcgcatggtggaaaagtcatccacaaccaaaaatttaagttctttatccgccatttcacactcctgatttaaatacgtatcgcctgtccggcactaatttttgccaacatttgctggcttacctggctaagatcgaccacttcgcagacaccacccatattgatggcctcacgcggcatgccgaacaccacgcaacttgcttcgttttgcgcaagggtccatgcccccgcctgacgcatcgccaacattcctgccgcgccgtcgttgcccatgccggtcaggatcaccccaaccgcattacgccccgcctgtttggcgacagaatggaacaacacatctaccgaaggccgatgacggttaaccgccgggccatcgtgaattttgatttgataatttgcgccactacgcgccagctccatatgccgatcgcccggcgcgatataggcatgtcccggcaagacgcgctctccgtcttcggcttctttaaccccgatctggcaaagcttattaagtctgtcggcaaaagagcgggtgaaaccgggcggcatatgctgggtaattaacagtgccgggctggaaagcggcaacggttgcagtacgtgacgaattgcctcagttccacccgttgaagcaccaatcgcaatcagtttttcagaactcagcaacggccccgccttcagcgttgtcggtgccgacaatggcttatgtgctgcaaggctcgcctttgctgccgtacgcaccttttcagcaatcatttcgctatacgccagcataccttcgcgaatacccagttgcggtttggtgacaaaatctatcgcccccagctccagcgcgcgcagcgtaacttctgaccctttgccggtcagggaagaaaccatcacaacgggcattggacgcaaacgcattaatttttcgaggaaatccagtccgtccatccgcggcatttcaacatccagcgtcaatacatcgggattgaatttcttaatcaagtcacgcgcaaccagcggatcaggcgcggtcgccaccatttccatgtcgctatggctgttgatgatttctgtcatgatctggcgcatcagtgccgaatcatcgacagataacaccctgattttgctcatcgttaatccttacttagcgcatacaccgtctgaccacgcagcgtgaagcggcgctcaaggtggctaaagttttcagagtgacccgcaaacagcaatccgtcgggtttaaggagcggaacaaagcggcgcaaaatctcctgctgggtagtttgatcgaagtagatcatgacgttacgacagaagatcgcatcaaacggccccggcacggtgtactgtttcgccagtaaattcagcggggcaaaatcaacatagttcgccagctcctgacgcacgcgtaccagcccttcatgcggtcccgtccctcgcatgaaataccgttgcagttgctgcggcgtcaggtttttcaactcttcatggcgatagataccgcttctggctttttccagcacttcggtgtcgatatcactggcaaacactttccagcgtccgggcgcggtgcccaatgtgtcagccagcgtcatcgcaatgctgtacggctcttcgccggtcgaagccgccgcgctccatacgcgatactcgccagaacggcgacgtgcgtgatccgcgagcagagggaaatgatgtgcctcacggaaaaatgccgtcagattcgtggtcagcgaattgataaacgcctgccactcaccgctgtgctgattagattccagcaagttcagataatgaccgaaatccgtcagtcccagtgaacgcaaacgacgaaccagtcggttgtaaaccatgtcgcgtttatggtcagccagaacgatcccggctcgttgatagatcaattgacttatccgccgaaaatgcgcgtcggaaagcgccaggcgctcggtcatctgtaacaataaagacgtttgcccacagggcagagatgaagtcatagcgccttctcaatcacttcaggataccactggcgcaatttgtaactgcgccgactcatgtcgtgctacttcatgttcttcaagggtaaataccgccacacgcgacgaaagatggtcggcctgattcgccagttgttccgttgccaccgccgcttcttctaccagcgaggcgttctgctgagtcacctgatccatctggctgacagcctgtgcaacctgctcaatcccccgccgttgttcttccgacgccgaagcaatttctcccataatgtcgttcacgcgggtcaccgaactgacaatatcggtcatggtcgcggcggcgttattcaccagtttcgaaccctgctggacacgattgactgactcttcgatcagccctttgatctcttttgctgcctgcgcgctacggctggcaagattgcgcacttcacctgccactaccgcaaaaccacgcccctgctctccggcgcgagccgcttccactgccgcattcagggccagaatattggtctggaaagcaattccgtcgataacgctgataatgtcgccaattttttgcgagctggtggcgatctcctgcatggtgtgagtcatggtactgacctgaacaccgcccgcctgcgccgttgtcgcggcattttttgccagttccgacgcctgtcgtgcgttatcggcgttttgccctaccgtggcggttaattgctccatactggcggccgtttgtgccagcgatgccgcctgctgttcggtacgacttgagagatcgttattgcctgcgacaatctccgcgataccaatgtgcatctcatggcttcccttacgcacatcactcaccgtcccacgcaaagcctgctgcatggtcttcaggctggcaaaaatggcggtgatctcattacgaccatataccgcaatcggacgcgccagattacccgcagcaatgctgtcaaaatggctaccgataatggccagtggttgaacaatcatcttgcgcgtccaccacagcgcactgctgatgtagatcgccgcaacaataatcatgctgataaacaccagcgccgaaatctgatagttacgctggctttgcgcactggcggcttccagcacatggttgatctccagctgccaggcctcaaagttaacgtcaaacgcattctgtgatccctgcaccggcgcagtgaggaaatccgaaagttgattactttcaagccaggtcgcctgatgttcgagatcgttgtgccagcgggcaaaacttttctccgtctctttttgcaatgctctgacgtgctcgttgcccgcagtcatcgccataaaacttttaaacagcgtggtggattgcgtcagactggcgcgcgccgtcgtcatcaacgttttaatgtcatccgccggatagctaagcgctgtcagagtgcctgctttgttcagcgcggtactggcctgtaacattaccgcccgagtttgcgctaatgccgcacgttgctgattgctctgctcgacctgattcagtcgttgcaaatcgtcgcgaaatgcccaaaaagacatgccgttactgccaatctgcaagatcccgcagagaatcaaaattaaaaacagcgtggtcgaaattcgaatacgattaaacatcaacgctccccatcaggcggcaatgaccgcgttagtaaatactcgtcaaaatgtttcccagtttggatcttgttcagcaattcgcagtcgtggctgtgccggtggttgctcactggcaggacgggatggtgtttgcggtttattggtgagtgggctggctgccagacgaaacgcggaaaccgcttgcgttaaacgactagcctgttcttccagcgcagctgcagcggcagctgattcctgcaccagcgatgcgttctgttgcgtgacgcgatccatttccgaaaccgccaatgcgacttgatcgatgccacggctctgttcatccgatgccgatgcaatctcgcccataatgtcagtcacgcgagtgacagcattgacgatattgttcattgtttccccggcgctttcgaccagcaccgaaccggtatcaacgcgcgagacggagtcttcaatgagagctttgatctcttttgccgcctgggcgctacgactggcaagattacgcacttcgcccgccaccacggcaaaaccacggccctgttcacccgctcgcgcggcttcaaccgcggcattcagcgcgaggatattagtctggaaggcaataccgtcgataacgctgataatgtcggcaattttcttcgaactatcggcgatctcatgcatcgttttcactacgccatccaccactttgccgccgtgctgggcggtgtcggaggcactttgcgccagttgcgaggcctggcgggcgttatcggcgttttgcttcactgtcgcggtgagctgctccatgctggcggcagtttcttccagcgcggatgcctgctgttcagtacgggaggaaagatcggtgttgcccgccgcaatttcacgggtaccggcatagatggcatctgaaccttcgcggacatgagtgacggtgtcagtcaaagagcgttgcatatgtgaaacgctctgcgccaggtcgcccatttcactgcgcccgtcaatggtcagggtattcgccaggttaccaccggcgatttcgcgaatgtgagcaataatttttgccagcggtgtaagcaacatacggcgaatgccgtaccacgccaccagcagaatcaataccaccaccagcgcgataaccgccagttgccactgagcaaatcggtaatcatctgcgttgtcagtgacgatatcgcgatacagtttttcactgctgagggcgtactgagcaaacgcttcgcccattgcattttgcattccctgggttggctgagcgaaataagctccagtattgccataatcaagataatcaatcagttcagttaatgctgtgtgatagtttttatatttttcatcaatattacgactggtagcgaccatttcatgtaacggtgccatacttttgaattttttataatgagtcgcggcctgggccaatgttttcctggcgctatcgagcaattcaactttggcattactttgttgattggaggaatccatcatcattcgcaccgctgaacgactcaggttaatgcgcgtttgcagcattaaatcccaggttgacgtcagctcgccctgctgttcccgtaattgattggaaaccacaaagctcttctggctatggtgaagggaagaaaaaaacagactgccggaaataagctgtaacagtgcgaatacccccagcaccattaccaacagcgtgactacgcggatacggttaatcataaggcaccttcctgaaaacaagttgatctcgttatcggcaaggaagggggaaactttattgctgatgccacccgccgcgaaattgaaataaaaaacccgatgcgcagatcatcgggttcatttcaattgaggaaatcaggagaattacgccacttctgacgccgcgctatctaacagcgccatctcttcgctgttcagcagtttttcgatgttcaccagaatcaacatccggtcgcccagtgcgcccagtccagtgagatattctgttgaaagcgtcacggcaaattccggtgccggacgaatttgctccgccgtcaatgaaagcacatctgaaacgccgtcaaccacgatgccgaccacccgctgtccgagattcaggacgataactaccgtgttgtcgttatagtccacatccacctggctgaacttaattcgtaagtcaacaatcggcacaataacgccgcgcagattcgtgacgcctttgataaacgctggcgtgttcgcaatccgtgttacctgatcgtagccacggatctcctgcactttcaggatatcaataccgtactcttcatcaccaagggtaaataccagaaattcctggcctgacggctcgctggccagctttgttacattcgtcataccggtcatattgttacctttttactcattcaggcggcggtgttcgccatacgttgttcgcggtttatcgcctgcaaggcggagacatcaacaatcagtgccacgctgccgtcgccaagaatggtcgcagcagaaatgccggggactttgcgatagttactttcaaggtttttaactacaacctgatgttgaccaattaattgatccaccagcaaggcgtagcggcgaccgccactttgtaagatcaccacaattccctgggtagcttcggttttcgcgcccgcgacgttgaacactttccacagttcgacgatgggcagatattcaccccgcacttccagcacccgctcgccgccggccagtggatggagatcggcttcacggggttgcagtgattccataacagcattcagcggcagaatgaaaacttcatccgcaacgcgtacggacatgccgtcgaggatggccagcgtcagcggcagtaaaatgcggatcgtagtgccagtaccctgcttcgactggatttcgacatgaccgcccatctcctggatattacgtttaacgacgtccatgccgacgccgcgcccggagacgtcggtgacctgctctgccgtggagaagcctggtgcaaatatcagcatcgcgacttcgtcgtcgctcatgttttcgctgacagtcaaaccttgcgaggccgcttttgccagaattcgctcacggtttagccccgccccatcgtcggtcacttcaatgcaaatgttgccgccctgatgttcggcagacagaattaaatttccgacgctgtttttacctgcggcgagccgtttttctggcagttcaataccgtgatcgaggctattgcgtaccaggtgggtcagcgggtcgataatgcgttctatcaggctcttgtcgagctcggtagaactgcccaccagcgtcagttctacctgcttgccgagttttcccgccagatcacgcaccagccggggatagcgactaaagacatattccatcggcatcatgcgaatcgacatcactgattcctgcaaatcacgggcgttacgttgtaactgccccatgctggtaatcaaatcaccatgattaaccgggtccagttcgctggaacgctgggcaagcatggactgggtgataaccagctcgccgacgaggttaattaattgatcaaccttttctaccgctacacggatgctggtggattcactgctgcgcgtcgttttttcccgctccacgcgaccggttggcgcttgttcggctgccagtttaagcactggtggggtggatatttttggcgagacttctactgtttcaaaggtaatctgatcggcttcaatcacaaaacagagtaccgctgtgatgtcatcttcggcgatatcgcccggtaatattgccgagagagaatccgcccctttcaccacgtcagttaacgttgtcagatgccccagctcttcttccagcaggtcgacttcgccggccttcaggcgcgaaaggataattcgtcgcggcaactgactgcgactctgctcatcttgcggttcacttttggcaaccacacttaatcgggtcactgcggatggcgtttcgcctttcgcttctaatgccagttgacgcaaggcctggcagatataatcgaagctggcggcatccggctcttgcgactgtttataagcgtcgagctgttcttgcatgatgtccttcgtttccaaaaacagattgataatgtcggtgttgagttgcatctcacctcgtctggcttcatcgagcaggttttccatcagatgcgtggtttcctgcaaaacgctgaagccaaaagttcctgcccctcctttgatcgagtgggcagcccgaaagatggcattcaattgttcggcatctggcgcttccggctgcaaaaccagcagatgctgctccatatcagccaacagttcgtccgcttcatcaaaaaatgtctgataaaaatcgcttatatccatgctcacgctgtcacctcggttcggctgatggcattgtgggaacactgacctgtggtgcaacctcaggtttttccagggcgcttactggctcattctggctttcggcgttttcatgcaaaatggcctgttcggcttgtttgttcagaaccagcaggctgatgcgacggttgacggcatcatcaggtccgcgatcgcttaagcgcatcgttgccgccatgccgacgacacgtaacactttgccgctatccaacccgccgaccatcagttcgcggcgggatgcattggcccgatcggcagaaagctcccagttgctgtaacctttctcaccgctggcgtagggaaaatcatcggtatgacctgaaaggctaatacggttgggaataccgttcagtacaggcgcgatggcgcgcagaatgtcgcgcatatagggttcgacatcggcactgccggttctaaacatcgggcgattctggctatcgatgatctgaatacgtagaccctcctggaccagatcgattttgagatgtggacgcaacgcccgcagtttcggatcggactctatcaactggtcgagatcaccccgcaatttccgcaatcgactttgctccatgcgttttttcaactcttcgatgttcggctgcttattcacttccccctggctttgggtgtaatcatcaccaccgccgggaattgggctttcactattagaaatgcgatcgccgcccgtaaccgctgtcgccagtggagtccggaagtactccgcaatctgaatcaactcttttgggctggagatggagatcagccacatcaccagaaaaaaggccatcatcgcagtcataaagtcagcataagcaatcttccacgatccatgtgctgccccgtggcttttggctttgcgtcgtttgacgacaataatcggatgcgcttgattcttcatgcttcctcggttgtcgtctgttgttgcggatttttcaccgcacgcacatgctcttccagttcaataaacgacggacgttcgctggaatagagcgttttgcgaccaaactcaacggcgataggcggtgcgtaaccgttcagattagaaagcagtgtgactttgacgcactgcatcattttgctggtttcggcgcttttctgacgtaaaacactcgctaatggggaaataaatccgtaagccaataaaatgccgaggaaagtccccaccatcgcatgtgcgataagcgcccccagctcggcggcaggacgatcggctgaacctaacgcgtgaacgacccccattacagccgcgacaataccaaacgccggaagtgagtccccgaccagcgccagactgttcgccgggacttctgcctcgctttcgtgcgtctcaatcttttcatccatcagggcttcgatttcgaaggtgttcatgtgaccgctgataatcaggcgcagataatcgacgataaaatcaagcatgacgctatccgcgaggatgcgtgggtagctggcgaagatctcgctctcacggggattttcaatatcacgttccagcgaaaacatccccatctgccgcgatttcgccatcaaccgataaagcagagccagcagatccatatacattgctttggtgtatttggagcgacgaaacagcaacggcagcgccttcagcgtgcctttaatcgctttgccattattgccgacgataaacgacccaatccctgcaccggcaataatcaccagttcagcgggttgatagagtgctccaaggcttccaccggtcatcaaataaccgccgaaaactgtaccgagaacaaccaggtaacctaataagataagcacgacatcatccttccactgttgaccatgacaggatgttcagtcgtcaggcgttaacgcgcgattggggcaaaaaaaagcagcggtacgtcgttaccgctgctggaatgttgcgccacaccgtatcagttaaacagcctgtactctctgttcatccagcagttgtgggataatatcggcaggattctgggaaagtttacgtctttttactgcccgggatggcggttgacataagctgcaggcaaagctgccaacaggctggtgagcgtgggtaataaaattgccgccgcagcagttgcagctggaaagttgcagtaatccactttcaacaaaccgcaccaatgtccaggcacgggttaatgccagcagcggtccttcttctgcttgcgggcactgttcaaggtataaacggtaggctttgatcaccgcgtcgacgccattacacaaaccggttttcagtaaaaactgccatgcattacagaacatcgaagcatgaacgttttgttcccaggtcataaaccagtcggttgagaatggcagcatgcctttcggcggtgggcttccgcgcagttctttataaagttttatcaggcgtccgcgacttaactgtgtttcgctttcaagcatctgcaaaagagcgcccaaggtgatcaattccattgccagctgaatatcccgcgcttcctgaacaatgcttttttcactcatgatcaggcccttttcttgcgcagcgcttcttcaggctgattaacatcattcagcaagcgtgttgagagcatgatgccggtatgaatttgctggagatcgtcaacgcgggaatcttgcgtcaactgagtaatcgtctggtggctgtcaaaacggaagtgacaaaccagctgattggtttctgccagcttaaccatttgcggaagagtcagtgccgctaatgttgtcgccatttcttcatttatgccgagacgaaacatagcggacgctttgtcctgaacaatcagacgctgtgcaagtagtaaatatgacaagttgatgtcataaatgtgtttcagcaactcggaggtatgcattattcccacccagaataaccaactttatttttatgcggtttcaccgcaccccgtgatgtcgccgggaagccccggtaaaaaataattagcattagaatagttgcgataagctgcaataagcagagccacctttttggtttaataagtccttacaaatagaagggggtctttacacttatctaagatttttcctaaatcgacgcaactgtactcgtcactacacgcacatacaacggaggggggctgcgattttcaataatgtgtgatgcagatcacacaaaacactcaattacttaacataaatgtataagtcatacttttgttttgggtgtatttcaatctgttaaaaagtttttcgctacgctagcaagcaaaaatgaaacaggaataatcgaaatgggatgttgcgcacagttaaaataactcaccgtaaataatcatctgctataaataatcactttcatgcaataccagataagctatttttaaacagacacttaccgcacaacaaactaattaaatacaaagaaaggcaacaatcaactttatgttaataaaatgttttgcatatattaaccacttgtttaatgcggagaatcagtacattattttcttataattacagttgaaatcatatgatcaccgagagtgattgattaattgtctttactaataatcagactaatatttacctgtttgactgagttgggattgcgtcgtttctccattaggagtaaagctttaatgtcacctgaagttcacagaataaggaacaggttatgagctatagcaatattcttgtcgctgttgcggttacaccggaaagtcagcaactgctggcaaaagcggtatctatcgccaggccagtaaagggacacatcagtttaattactctcgcttccgacccggaaatgtacaatcaattagctgcgccgatgcttgaagatttacgcagcgtgatgcaggaagaaacgcaaagctttcttgataagttaattcaggatgcggggtatcccgttgacaagacgtttattgcctacggtgagttaagcgaacatattctggaagtttgtcgcaaatatcatttcgatttggtgatttgcggtaatcacaatcacagtttcttttcgcgagcatcctgctcggcgaaaagagtgattgcctcaagtgaagtcgatgtgctgttagttccacttacgggagattaaccgctcctacgcaagcttaggaaaggtagcaactttatcgcgctgctggctttccgcgcttcgcggaactatctgctttaggtcgctgatgaagcactcctgccagtggttaatatcgtttttcacgataacgtccagcatttctgcatgacgggaaatacgttccgccagcgacatagtcaatgcacgatccagcgcagctgcaacttcgtcacgatcgtagggattaacaattaacgccgacgttaactcgtttgccgctcccgcaaattgcgaaagaacaagaacgcccgggttggctgggtcctgagcggcaacatactcttttgctaccaggttcatcccgtcacgcagtggcgtcactaagcccacgtcagagtagcggaatattttcatcagtaatttacggtcaaaatgctgattcaaataataaagcggcgtccagcctaattgcccgtatttaccattaattcgtccggcttcattttcgagctgatgacgaatatcctgataggcttgcacatcaccacgcgacgttggtgcaatctgggtataacgaattttaccatgatgctgcggatatttttccagcaacgcttcataggcgagaaaacgctctggcaaacctttggaataatccagccgttcgacagaaaagatattttgtacgtttttcagttccgctttaagttgcgccagttttggcggcagtggcccggcagcctgtttggctatttcttttggctcaatgccaatcgggtaaacttctgttcgaaacgctttgccccaggctgtatggctttttgcgctacgtgtcgtgacgcgggtcaggttagaaaggcaatccaggaacgccagacgatcgttttctgtctggaaacccagcaaatcataatcacaaagctgttcaagcaaggtgtcatatgtcggcagcgcgttgaagatttccggtgtcgggaaaggaatatgcagaaagaaaccaatgcgattattcactccccgtttgcgtaattcatgcgcaaatggcaacaggtgataatcgtggatccagataatgtcatcgtcttgtaacagcggcagtaatttatctgccagcaacgcatttacgcgtagatagccgtcccaggcaggacgctgaaattgcaccagatcgagccgataatgaaaagcgggccagagaacggcattggagaattggttgtagtattcgtcaaggtcctgttcgctgaggttaaaagaggcccacgtaatgttaccttttttcaccttttttagcggctgatcctcattccctgtttcaccactccagccaaaccacagtccgcctgcggctttcagtgcccccagtatgccaacggcaaggccaccggcactggcggcgtgctcgtctggtggtgcaatccggttagatactacgactaaacgactcatagtcatcactcctgttattttctcttttttgttgtaatgcggtggttatcatttcaagccagctccagacatccggcacacccgccagtcgccatgatgcctgagttgcgcctgtgccaatttttactgacattccgcccagtcggttaacgactgcgaagccagattcatcggttaaatcatcgcccagaaatacgggcgttcgcccgataaagggagcttcctgcataaaggcagcaatcgcctcacctttactggtacctctcggtttgatctcgacaacacactttccctgctgtaacgccatttgtggccagatctgagtaatacgttgcgctaatgtcattaatgcgtcttcatgctgcggagcctgacgataatgcagcgcaaaagccatccctttcgtctccagctccgcaccgggatactgggcgatgaccgtatgcagttgcacgttaatatcacgtgcaatcgcatccggcagatgaacgatatgcgttttaccattgatgtcacggcgctccgccccatgcacgcccgctaacgggaagcgataaggttttgccagtgcgtccagctccaccattgagcgccctgatatcaatgccaatgcaccatcacttgcggttgccagtagctgaagtccttgcagaatattgtcaggtacgacgacctgatcgggatgcggtttgatttccgccagcgttccatcgagatcaaaaaaccaggcatatttcgcggatagttcaggggtttcggttaacggttctgtcacccggttctcctccttctcttttcttattgtgttgcgcagaacgcgctttacagacatgtaagtatagacagtgtgacgggggtcgccatttgcaacgaagaacagccaaccgttgtggcggctggctgtggtgggaaaaaacgttaaattgttgtggaaaaaagcatcagacagtgcgtttcgctttttgcttgtaacggtcgaagatcaccgctgccagcaggattaagccgcgaaccacgtactgcgcgaaaggagaaatattaagcaggttcatggcgttttccacggtgcctaaaattaagatacccgccaccacatatgagatttttccgatgccacctttcagagaaacgccacctaaaacgcaggcggagataacaataagctcataaccaatcgacgtcattggctgcccactagtcatacgtgaagccagaataattccggctatcgcagataccaggccagagagaacaaagataataattttggtgcgaacaaccggtacacccgccagacgcgcagcctcttcgttcccgccaatcgccagggtattacgaccaaaggtggttttattcagcagcaaaccaaagataatcagacacgcgacggtgagccagattggcgcaggcagaccgaaccagttagcgtaaccaagggcaaagaagctttcatcttcgataccgaccgctttaccgtctgaaatgatgtacgccagacctcgaacaatctgcatcgttgccagtgtcgtgatcagagcatttattttcagtttggcgataacaaagccattgaccaggccacagagaatgccaagcagcaaccccgctgccacgccaatccacaggctttcagtcaggttgataaccaccgccgtggtgacacccgcacaggcaattacggaggcgacagaaaggtcaaagtcaccggaagcaaggcagaacaacatgccacacgccaccatccccgacatggaaattgccaggcccaaccctttcatattaatgaaggtggcaaaatttgggacaaaaatggcacaggcgataaagagcaccgcaaacaccaccagcatgccgtactgatcccagatacgcccgaagctgaatgacgacttaggtgcgccagaccccgatgtagaaacagaagacatcatactctccttactcaggcaacagcctggctgactttaggcatcgcaaggctcagtgcctgacgctcatctgcctgctcgtgtaacaattcaccggcgatttcaccttcccgcatcaccacaatccggtcggcaacgccgaggacttcaggtaagtcgctggaggcaaacagcaccgccacgccctgcgccgccagcgcataaattacgttatatatttcgtgcttagcgccaacatcaatgccgcgcgtaggttcatccagcaaaatgaccttcatctcttccgataaccagcggcccagaatggctttttgctgatttccgcctgagagattcatgatcagttgctccgcgcccggcgttttgatgttgagcgaacgaatgtggtgatcggcattgttttcttcccaaccgttgttgattacacaaccgccgagcacatgtttacgtctggcactgatgttgatattgtcgcgaacggagtgcacgggaataatgccttccgctttgcgatcttccgggcagagcatcatgcctgcggcaatggcgtggctcggtttacgaatatcgatcggctgttggtcgatataaacctgaccggcggtgatttgcgtcccgccaaacaagcctttcattaattcgctacgccccgcccctaccagaccaaacagcccaacaatttcaccactgcgaaccgccagatttattggcgtacgcacgcctggtgctttcacagcatcaagacgcaggcgctcctcgccataactacgcggttgccagccgtagatatcgccaatgtcgcgcccgaccatcgcctgcaccagcgcgtcgtggtcaacctgctgcatatcggtaaaggttttgacataacgcccatctttaaagacagtgatggcatcgctgagggcaaatatttcttccatacggtgagaaacgtataagatcacccgcccctcttttcgcagttcacgaataacgcggaaaagattgtcgatttcgcgggcagaaagggagctggttggctcatcaaaggcgataattttagcgttacgcgccagcgctttggcgatttcaaccatctgccactgaccaatggagagatatttcagcggcgtgtccgggtcaatatccataccaagatgtttaagttgtaaacccgcctcataattcagcaatgagcgattcacaatgccgcctttatgcggcagctggccgagatagatgttttccgcgacggtcatttccggcacgagatgcagttcctggtaaataatcgccacacccgcgttaagtgctgcggtcgtgtcggaaaaggacatttcctgcccattaatcactacagaacccgtggttggcgcatagttgccgctgaggatttttaagagagttgattttcctgcgccattttcacccatcaacgcatgaacctgaccggcatagcagtcaaaactaatatccgtcagcgccttaacgccgggaaacgttttaccgatgccgcgaaatgagagatacggggtagactgttgcataacgtctccgtgaatcactggtcgttcacaccccctctgcatcatgcagaggggaatttttccggcaaattacttaccgcctaaaccttttttctccagttcttctttaaagttgtcacgcgtgatcaataccacgtcggtaacttcggtaaattttggcggttcaacgtcttttgctacccagttgtaaagcatttcgctggatttatagccatgtacgtccgggcttggcagcagggaaccgtaaaagccggttgcctgtgctttagacagttcgctcaccgcatccacaccgttaatgccaatgccgatgatatcggccgctttaaagccctgaccttccgtcgcgcgtacgccgcccagcacggtgctgtcgttcataccgacgatcagccaatgtttaacttccggatgttgaaccagcattgagttggcagcgtcaaatgcccccgggatgtcgttagatttggtaggtacctgataaatttgtttttccgggaatccggccgctttcagtgcgtccatagaacccgttgtacggcggcgggcggtatccagttcgttggcggtaatcgccatcaccgcgctttctttgacatcccagccacgtttctgcatctctttatacagttcctggccctgacgttcgccaattttggtcgccgccatcatcaccagaggaacggtatccattggcttacctttggcgttaacaaactggtcatccacggcaatgactttcatatcgtagccacgcgctttcgccacgatggcagagccgagtttcgggtccggagtacaaataacgaaaccttttgcgccactggcggccaggctgtcgattgcgttcaatgttttttcgccatccggcacggcaatcttaataacctcaaaccctaaatccttcccggctttatcggcaaacttccattcggtctggaaccacggctcttccggttgcttcaccagaaagccgagcttcaggttctccgccatagcggattgtgacataacggctgccagaccaatggctgccagggctttagtaaatttgtgcatggttctctccagctttagtgtcgttttgtgtagggcaaaaacgaatgacattcgttaaattaatcggaaaacaaagcattaccttttaactaaaagataagtgaccgtgttgacatagttttagcgagaaattaattctccataggagagcaatatcacatcgcagaattacagtgagaacgtgcataaatttagcgggaaaagacataagggaaagccaatttgtcagacaaattgtcgaatgcacagcagattaatccataagattagcctggaaatccttgttgtctttggtacccatgcgggatgtcttctttttcaccagtcaataggccgcattacctggcgttgagtttttgaaatggtgtaataaccgcaactcaaagatgtggaaaatgcacgtcattcatttcgtcattaattatcactgtgctcattaattaacagaacacgtataatgagagccatctcgcaaaaatgaaaaaacgttttataaaatcatcacttcatcatgaattcaaattcattgattaatatcaacaagatacaaaaagcactatcattaaaattcattgcagttacattgatttcatcaatgaaatgtaaaaatatataaacttgatgatttaagcattttcttatacccgttcagacgttattcttatttcagatcatcgtcagaattgactccacgatcacatttcggaccggcagaaaggaattattctgcaaacagtaattatggtgttttgatttatcttgcacctctccacttctggatataaggatattaggtatggcaaccgctggaatgcttctcaaactcaactctcaaatgaaccgcgagttttacgcatccaatctctaccttcacctgagtaactggtgttctgaacagagtctgaacggcaccgccactttccttcgcgcccaggcacagagtaatgtgacccaaatgatgcgcatgtttaactttatgaagagtgccggcgctacccccatcgttaaagccattgatgttcctggtgaaaaactgaactctctggaagaactgttccaaaaaacgatggaagaatacgagcaacgttcaagcacgctggcgcagttagccgatgaagcgaaagaactgaatgatgattcaaccgtcaatttcctgcgcgatctggaaaaagaacagcagcatgatggcctgttgctgcaaaccattcttgatgaagtgcgcagtgcgaaacttgcgggtatgtgccctgtgcagaccgaccaacatgttctgaatgtcgtgtcacaccagctgcattgatcatacatcggcgctaatgcattgcgccgatgaagtttttgagaaaccgctgcctcatctgtttgaagcagcggttttttaatgggattcgccttgtggggtaaacttgagttcaatcagcgcgatggctttttggattgcccgcatggtgaccgggtctgcggcggcgggatggttagtaaagtcgatattcttcagctggctggacattttttcacgaacttcaacgggcgcgattacatcgagaacatccagaatttgtttgataaccaactggcaagcaaccacatcagaaaccagttcctgatcggcattcagcggctgggacatcgtaaactcctgatagcattttgaaagccgttatagtagcggcttcacatcttcagcgatagtcacatccaccgtcatcaggacacaaaaaaacctgccggagcaggttttttgttatcggaacatattgcctggcggtacgtctttgaacgtcttgcaatagttattgaacatacttttcaggattttgcgcagtttcatcgcggcactccgaccatttgttatacaggtgttattgtctttgcgcttataatatgacaaccatcacaaaaatcaatctttatgtgatacaaatcacataaatacccctttaatgttataaaaatgataatcaaaaaacagcccccctatttctgacacctacagatggcaagaaatagcgcctgccaggcgtcttttccggccattgtcgcagcgctgtaacgcgtaaaatagtgctttctcttactcttctggctggaccatgagacttctgattctgactctttcattaataacgctggcggggtgtacggttactcggcaggcccatgtgagcgaagttgacgcggcaacaggtattgtacggttggcttatgaccaggcttttttgcagcatgcccgtaccgatcgttatgtcagtcgcgggatcgccgatcgcgcatgccagcaggaaggctatacccacgcgatcccctttggtcagccagtaggcaactgtagcctctttacgggttccttatgtttgaatacggaattcactttgtcatatcagtgccatcattccgccttccctgtctttctctaaatgttttaatcagcgagggggatcttcgctgattaaataaatagcggtaatgcgttttattcccattcgtatttttaataattgaagtttatattttaccttttgcaaataataaaataacaaattatagtgacgccacagcaacaaatataacctttgtggagcactatcatgctgaaaccagaaatgattgaaaaacttaatgagcagatgaacctggaactgtactcttcactgctttatcagcaaatgagcgcctggtgcagctatcataccttcgaaggtgctgccgcgttcctgcgccgccatgcccaggaagagatgacgcatatgcagcgtctgtttgattatctgactgataccggcaatttaccgcgtattaataccgttgaatctccgtttgctgaatattcctcacttgatgaattattccaggaaacctataaacacgaacaattaatcacgcagaaaattaacgaactggctcatgctgcaatgaccaatcaggactacccaacatttaatttcctgcaatggtatgtttctgagcagcatgaagaagagaaactgttcaaatcgattattgataaattaagcctggcaggcaaaagcggcgaaggtctgtattttatcgacaaagaactctctaccctcgacacacaaaactaatgctctccggcggcaggttttctgccgccgtttcaaatcagtgacggcaaatcttactctgatcggtcgaaaaaccgtcttcagaaggaataaatttgccttttgctgccagaaacgctaccagctctcccgctgtcatcccttctgccgagcaagtgtgaaaacgtgcctgttcaccaaaacgcgctttaatcgcagcttccagactggcatgcgtatattgctcgcctgattcaatcatcatatttaacacttcatgaccgtgtatagagtccatcgttcctcctcaaaaaaaggctagcgtagcgattaccgcttatgaagactttgcgccagcgcaggactgaatgctttttattgtacatttatatttacaccatatgtaacgtcggtttgacgaagcagccgttatgccttaacctgcgccgcagatatcactcataaagatcgtcaggacagaagaaagcgtgaaaaacagaaccctgggaagtgtttttatcgtggcgggaaccacaattggcgctggcatgctggcaatgccgctggctgcggcaggtgttggttttagcgtcacgttaatcttgttgattgggctttgggcgttgatgtgctacacggcgctattactgctggaggtgtaccagcatgttccggcagataccggtctgggcacgctggcaaaacgctatctgggacgctacggtcagtggctgacgggcttcagtatgatgttcttaatgtatgctctgactgcggcatacatcagcggtgccggtgaattgttggcctccagcatcagcgactggacaggtatttcaatgtcggcaaccgctggcgtgctgttgttcacttttgttgccggtggcgtggtttgtgttggaacatcgctggtcgatttatttaaccgttttctgttcagcgccaaaattatttttctggtggtgatgctggtattgctgctaccgcatattcacaaagtgaatcttttaaccctgccgttgcaacaggggctggcactgtctgcaatcccggtgatttttacgtcgtttggttttcacggtagcgtgccgagtattgtcagctatatggatggcaacattcgtaagctacgctgggtgtttataaccggtagtgcgatccccctggtggcatatattttctggcaggtggcgacgcttggcagcattgattcaacaacctttatgggattgctggctaatcatgccggattaaacgggctgttacaggcgttacgcgaaatggtggcctctccgcatgttgagctggcagtgcatttatttgctgatttagccctcgccacgtcatttctcggcgttgcgttaggcttatttgattatctggctgatttgtttcagcgttcaaataccgttggtggaagattgcaaacgggtgcaattacctttctgccgccgttggcgtttgcactgttttatccacgaggatttgtgatggcgctgggttacgccggtgtggcgctggcggtactggcattgattatcccttcgctgttgacctggcaaagcagaaagcacaatcctcaagcgggttaccgggtcaaaggtggtcgtccggcgctggtggtggtgtttctctgtggtattgctgtgattggcgtgcaatttttgattgcggcagggttgttaccagaagtgggatgattagatagcctcaaattccttattgggtgccagaattaacgctgacacccaatttgacttcttaatgcaggcagcactgcttaaatttcttaccactaccgcacgggcaaggatcgttacgccccggtttctcttctgctttgatcggttgctgaacagctttttcctgcggatgcgccatccagtacgcatgtagatcaagcgccgccagtcgaatggcatctacgctctcttcaaacgcttctggcgacatcttctctacccgctcgaagttttcctcagtaccgtgcagcgcaatcgcctccagcgctggttttaacgaatcgggcaatgttgaccagtcagaaagtgccacgccccgcatatagccaaagcaccactcctcaacaatcgtcagctcgctgccatcaacttctcgcaagccgaataacggctcaaactgctccgggaattcgttcagacgctctgcggtatcggccatatgttgaaaagccaggttcataaagcgcgtcatctctttctctgacgcccagcgcggcacatagtcagccccaccccacacggcaaccagccactgtgccggttcaatctcttgcggagaactcaacaccgccgtcaataaaccgtccagctccgccacatcaaggatggcgtggtcagtgttgtatttggtcagaatatcgtccagccattccaactcactttcgtttaacggtcccgttttcatacgcttttccttgtggatctcaactcgccagcacctatcttacatgccggtccgtatcagagatactttttgagtggctttgccggtgattaaaaatcaaggagggtgtaacgacaagttgcaggcacaaaaaaaccacccgaaggtggtttcacgacactgcttccaggagattttaaaccctaagcacgctctatgagttataaagcagtgcattgtgaaactttgctgcaattgcccctctactttactgtaattggcttggcagtaaatagatagacatggataatgttgcgcacaggaacagctcaggagaacagtttcctgcctgagaatattttaaagaaagatgatgtgtaatctgagtcttcaactaagaaaaagttcggtttattcaacaaagccccgcagcgagcaacccataatacacacgcagggcttcaataatgaactcagtggacaatttaactactcatgtgatcttccattttttcaagtgcagagaaatagattttactgcgcacatactcccagcattcaggtttcttcgcccactccgaaatcatcctgccattcgcagattcagccagaaggctattcacccgataggctaagctgacaaggcagttccccatcgttttctcaatgccttgttgattccagatctctgccaggtccgtttggttgccataaagatgtgaataggcggccaccgtataggcgacgatattcgccttaaatgcagggaaaagtgaattaatcagcttataggctttcttataaataatggcctgcgcgatgtaatttttaaaactctcactgttcaattcattcccataacgctcagtatccttgtcgatcatcgtcattaatgcggcaaagttcttctgtccgccaaggctgactaaatccggacgctggagccaggcacagtgatattttgcgaaatccgttttcgttattcgacgagagggaggaatagcgtcttttaagcgtttgattccagctagtgttttaccttctcgttccagcataaccttataactgccgttcgctcgctcgtaaaaccaacgactgtatccgtccgggcaatacactgtgtttgccattttttccagctgtacatgtaccggtcgattggctgacagatcggaaatattgactttgttctggctattcgagaagcgcgaaatatccgcaattagcatctcttcttgtgcattattcgtctgtttcagcacaatgacttttgcgggtacacacacgttacgaagattggttgccggaaatttctttttggtgaaaaacatggaagccgtagtctgcccaccgttgacaatctgcatcccctgcatccacgcaataccggggccacctcccggcgcttcaccaagcctgacctgatcagcaacaatcacaatgccgttgttataagccataaaacgctcaggctgctcacgtaaagtgtcgcgaatccccttgttgactttccccgtctggctcaaaaatgagcgaacgttcgcttccagaatccggttaccatatttttcatagataaatcgcagcgtctcgcccggaaccaccgtcagcgcataatcgtactcacccatttcatccgggatccagacgcaggggagtgcgccccccgctacctcatcaaaattaacctgcagttcgtcgcgtggcttaccctcctgccagtggttgaataggcggacaatgtccataacctctaatttaatagttttaccggccacgtctcgggactgataccagcgggttttcacctgaccatcagtcagaacatagattctgatttgctccagttccgtatacgactgttcgatggtcgtcaccagttgccaggcatcattggattgatcgagcgtggatgataatttaccgtcaacgcacttctgcaaaaattgaatgcagtgaccggcaatcgcttttgtctcagcatccgggacgtgacaaagctcgtcgctaccgtgataaatactgacgaaaaggtcaagttgatcgccatcttctgagaaggcataaccgctgagacgcacattgtgtcccctgactttcgccataaagtgacacgtctcagcatcgtcgaatgtcatgccgatatcggccatatgacgcataacaatatcggtaaaaatcagctccggaaaaggcgactcaaccccaggctgcgccatttgatcctgatattccttgcgaatctcattctgggtttgacgtaaaaaatcaataagttccatgcggtaatcctgcaaagtctgacaagcaatggttaaaattttgagcctggggaataagtgtctggagttcgagttgatagcacgcactcaccaccggcaacgggacattggcatgcttcaaagagggaaaatccgcttcaatggggagtgcgaacgcctctgtcagcaagaaatgacgtgtatagaattcagcatgttcagtgaaatatccgacgtgacaaagcgaaccctcaaaaagacaggtcgccggagcgtttccctcaaaccgctgacgaagacggtgaatgaggtgattcagggtcgcgccggtaggatgctcgctgaagcgcaaaccgcataacatgagcgagccagaccgctgccagtccagttgttctagagcgtggatggttacgcaaaagccctgctctgcagtggtgctttttacctcaatggcgcgttcatcgagttcaaaatcctgtaggccatgctgcggacctacccatgcttcgactgccgttgacgacgcaagaccgctctcgatcaaccgctccagacacgtcaattccccgattaaccccacttcttcttcgtggctaagtggacgggtatcgcgctccataaacgcctgccataaacgaatccgacgaagcagggtttcaaatagacgcggttcagaaacgttcaggagcgaatggataatatccagaatcatcgtcgtaaagacatccgcattccccgtttgctggcgacggatcatcaaaccgttctgccgcctctcctctgttccggtcatctcaacgcgaaatcctttacaggacggcagcgccgtcgaccccggcgaaagaggatgaggaaacacgacaatcagcatttcttcattataaggctgacgacgtccggcatgaaatttacaacccaggtgtgtaaaaagccgaattccgcgccagccctgagcgccgtgctgttcgtctatctgagatcggtctaaggctttccatgccgccagcagatcatctttactcagccgcaccatactcttgctcccacagtacgttgttcactttgtactccaccgttaccccactgctgcttcccggaaaactgatgccaaaagccaccacaggcaaagcatcatcctgatattccgctggcgacaatgcctgttgcgggtccagtaagtaaatgagcagtagccctttttgacgctgtgccgggatgtcgtttatgccaaatcctttaatccggcgcagtactacgccaccaggaatgacgggctcctctcgcccttcattgcgtccgggatcggcatgaaaaatacgctgcgtttctgccagcgcggcaagccaggtcgattcatcgcagtcaatcccttcatcgcgtggggaaagtaaacggccaatagaatagcggtcagtgaccccctcagacgttttacgcatcataagcgggaccaggaagccacagacatcatgatgacgatcgacgccgcccccaataaccgccaccgtccagtgggtaagttcatcgacacgattcatccgcacaatgaaatccgccagcagtttgctgttggccttcctggcctgaatgtgggtttcatattccgataagaaatcaatgatcggctcgggagagacgtttttccaaatgacccctttccatttttcaatcttctctccgcgccgtctctcaggtatcggcgcaccagcgccgacgcgcccggtcagatgctggaaggccgcatagttacgcttgtggtactccggctctttaaacaacgaaatcgtttcgactaccgtgccactgaaagagagccataatgagcgcgcactacgcatttttaagggggatgtcaccatcaacacggggtgtgatttcacttttagcccgaaatcacgcggggttccgccgctggcaaccatattgtcaaactcctctctcagctcttccgatgcatccgcaatgtgctcaaaccattcaatcagctcatcggtggtataaagccggcatacatccagatatccctggcgataaccaaaccaacgccccatctgcattaacgtgtcatacatgcgggaggcgcgtaaaaaataactggtgcataatccctcaagcgttagccctcgagccagtttgtctccgccaatcgcaatgacttttaagcctgtcgcattgtccgaataatcaagcgcatccttcgccgttccgtttatcattcttaccgacacgttttcgatcacggtatacagcttgtcgacgatctcccgccactcaaaggcgtcgtccggaaactgctgcggcataacgtcgcggatcacctgactcgtcggcaaaaaatcggcctgccagagtgactcaagctgatgtaaaaaaggttcgtgtccaatctttcgcgtcagtcgctgcctcacatcctgaatgtaggcatcaatattttcataaacaaccgattgcaccttattgaagcgggtcacatggaccagcatcgaactgtgtttttctccctgaccgcgtaattctctgacacagcacgctagtaaaaaactgtcgatggcgtgttttaacgagtcagggaaatgagttagcgtatccagtgtgggatagtgcgagctcttatgagatacaggcatccaccccctttttccgtcatcgctacagtgatcacttactcgcctgatcaaaggcaactctccggtccggccttccgcggtggcccgcccaaataccctcgcagggccgatgtagttagagggggcgccgagattaatgataaaggcggaagggaacaaatccgggccttcatcacgcgtttcattgctctcgtgaataaaaatattggcaaagggcgtggcggtatagccgacatacgcctttcggctgaactgcatcaacagcttacgaatcaggctattgattgccgttggctgatgttcagcatccggttttccatcgtcatcgtagacgatttctcccgtatcaactgaggcgttatcagcttcatcatcaatcatcagcaacggtaattccgaaacaaaacgctttccggtgacgggatcaacgctggtggctacatggttttcaatccaggtatgcaggcgtttcaaaatagacttatttttctttaccacgaacagccagggccgttgctcggggctgattcccagattcttagccactccggcactgaagtcgcccttttctgatcggttggtgacataattggggcgaatgacaggatcgctatcaatatcgcccaccccaatgatggtcactttttctctgagtggacttgtctcgtaaccaagaaatccttcatcaagacgcatttgggtctgcgatcgaaggttattatgcaaaccagcgagcacaatgattatcttatatcccgcatctgcggctttacagattagaccggtatagtggctggttttccccgactgaacatggccgaccaccagtccacgccggtcccagcgcccttcccgccccggttgctcaagtaatccaagaacacgatccgttgaacggtccagggtatccaggactccccagggcatcgttttgccaagccactggcgatatcgatgccagtagcgccattcgcgtttcgcatcagcggtcaaccagggttgatgtccttcgtcattactcagagaagaatcttcccccatccagatgctgtaacggcggatcaactcttcgaccagaatctcacggctatcaaggctgctccactcaggtttcatctgacaaaccatatcaatatgttggcgcagaataccgggcgtgatcgtgcttttatcctgactttgcaggaacgtttgcacaatctgcaatacgctcagttgcgtgtcatccagggaattaagactcatagcgatttctcatgttgaccgtcgggaagttgtgcaattaattcgggataattatcgaagggttccatattttgcaggtgctgtttcgccagcgctggtgacatcgcctgctgtccaaccatagtctggtacatgacctgcaatacggacaacacctctacgggcggtgcggtttcaaagcctgttcgcggcgtctcttttgtctcagccgtatcaagccagatttgctgaacaggaacggtttcctcaatcagtcttagcatggcctgaatttgtggggataattcaccagcctgggaaaggacattactgatgacaggatgttgtaacgaaatctggtaacgaacaccggattgcgtcttctgcgcttgccagagatgaacgagttcctccccgggcttgcgcttattcattttcccgcgttttgcaaatgtccttaccgcacgatcgcgtgttgattgcgccagttgggataaccagggacgcagcgaaaccggtgggcgtgccatcgacttacgaatatcaatcttccagtctatgtcggcatcattagggatatccagacggatccgcgcaaggcggtgggtttcatctttcgtccaggcccgggggctaccgagtccaagccagttgcccgcgaccagcaatcgctcattccgatatacatagaatccttgctgagccgtccatcctgccggtccttgagcctgttgatactcctgcgtcgtcagatgatcctgatgcggcagaacatgacactccaccttcacggcaggagcacctggcgccattgccaaaggcgaatgccagggcttggaaggatgcccgctgaggaagggatcccaggctttaattttgcgaccattaagggttagagtgagtcggggagagtgcccctcaaggaatcggtgaaataccatcgccagatgttgttcaacgccatccatcagcttgaggaaatctttctcaccgtaaccgggtgtgacaattcggtctaaaacttcccacagcactagcgtaccctgggagtcaggttccgcatttgctaacgcatcctgacttcctgggtcagcaccttcaagtaaataccaaccgtcgtccgtactggcggcgagaatgtccagatcccaccgcaggacagtcgttatcccctcttttttggaggagacagtcagacggcgacattgcgaaaaggaggcggttttgagtccaagaccgaagcggcccagatcgtgtcccgggcgctttgtcagcgggtttttgacacccagccgcatcgcaacatccagttcaggggccgacatgccgcaaccattatctcgaaccacgatatagctatccgactcacgccagtgaaaggtcagatcgaccttacgggcaccggcactaatactgttgtcgatgatgtcagccagcgcggtggcggtgttgtaaccgagtcctcgcagcgcttcgatcataatagctgcattcggtggcgcatggcgcatggtcgtcactcttcttcttcctgcatctcgctcaacgcggtttcccattgttcgacgaagccgcctaatttcgacgcccggctgtgatgacggagcttacggagcgctttggcttctatctgacgtatcctttctcgcgtgacgtcaaactgtttacccacctcttccagcgtgaaatcttgcgtcataccaataccaaaacgcatttttatgatctgtttttcgcgtggcaacagcgtatccagaaccgatgaaatatgttctcttagctccagagactgaacaggagcactggtgaaatcccttctggtcaacagcacgtctcccgacaggtcctgggcgtcatcatgaaaatcaccaatcagcaccgtctgttcttcatatttagccacctgaagaagttgacgctctgacaagtcggtcatttcctgcaactgtctaaggaggggcgttattccctggcgatgcagcacctgatcccgactgctccgccaacgtctgaattgctcatagaagtgtacgggtaaacgaatgagctgcgcctgatcggcaatcgctcgggtgatcttctggcggatccaccaggaggcataggtggagaatttaaatccacgccgatagtcgaatttttcaacggccttgatcaagcccaaattaccttcctggatcaggtcctcaatatctaatcctcgcccgcagtgttttttcgcaatcgcgactacaagacgtaaattagcgtggattaacccctcccatgcgtctctgtaattactgacatacagactcactttaaggcattcatcagggatgagcttttgggcgcgcacgactatctgttgcaggtctgcgtactccgggcgggggatatgattatcctggtactcttctgctttcccacttctaagcagaaagagcagatcgttaaagctgatggcgtcatcgtaatcgtcatcggctgcggaagagatctcctcatccgcttcttcctcgtcgtcgtcctcttcagtaatctcaggcgctggcggcggaaggcgatacggatgtagcaactgaagatattctgcttcgggtaatcctgccaggatcgtcatcaaattgataagcgccgtatccatgcgctgcccgagtcgctcttcctttgttttatcgacaacatcccattgccgaatgtccacaagataacgttcaaagataccgggctgccgcaatgccccgaaagcgtcaaaccagggctcgagatcatcactcgctgcaaattccccacaggcgtcactttccggaaaagtatcatcgccatccacaatcgtcggtaagtccctaatcaatgcctctacgctgagccggaattcaggccacggcataccgaaatcttcttccccggcatgccggatgtcacgcacagagacacgaccggtatccagtgcgccggtaagcaacgttgagagacaagggtaattttgcggggcgtgagaaactggtgtcggtggatcagggagggggagttcgatatcgctccactctgcagagtcatctttcgggcgatagcgggataataattgctgagccttcgcggaagcatgtcgtaatgtcagattatcttcggcgggttccgattcgacttcagcatcccattgcataaaatccattgcggcttcggtttcgggaggttctgtttcaacgtcaacatctgattcggctttggcttcaatttcaactgcggcatcatcaacatcaactggctcccctgcaggttgctgcccggcaggcgaaggagattgtcgataacgggccaacagatcgcgcaacgttttctcctgcgcgaggtcactggcacacaacccaaggtcgtttcgatgttctacatcgacaccctcgcacaacaatatttcgcaaatagcaaaatgaccattctgggctgcgatcatcaatgggctattccccagagaatctcgtgaatctttcggcaatcccctgctgagatgaaactccactacggaggagactccgctttttagcgcccgaataagtaaagggggaatgcgataaaactcagaaatagtgcgatgcatgttgaccgtctttccttgtaaaccacatccgcggaaatgagatctatcttatagggagaaatttgaatttggtactgtatatataagttatatgtcatttttggtgatcctcatcgccaattgggcattgaagaaaaaattgagcttttgctgagctgaaggaccagttaaagcttttgctgacaacacatgcagtcacgtagcaaactcgaagttcagaaccaccaactggcacacctacaaaaaacgcccttattaaccgttgctcaatgacttccaggctggatgacgaggatatttaggtctggtatgagtgtagtggtttactgaatttggcagtcgaaatcaggaaagactacacaaaatattccggaaaagttctgcctgtcttcgggaagatagacccggataaaatcaaacctgagcatattcggcgctatatggatcaacgcggtttatcaagtcgaactcaggcaaacagggaaaaaagctttatgtccctggtattccgttggggttatgagcgaggttatgtccagaggaatccttgtcagggagttaagcagtttaaagagacagcacgcgaacgttatattacggatgaagaatatcaggccgtttatgaagtgtctcctgatgttgttcgcgtggcaatggagattgcctacttatgtgtggccagacagagtgatgtactttcattgcagaaagatcagctgttcgattccgggatctacattcgtcagggaaaaaccggcgttaagcaaatcaaagcctggtcgcctcgtctccagaaagcgatagctctggctcgttctctgcctttaaaaccgggaatcagtagcctgtttgtgattcatcaaactaccggaggcaagtacacccgtgatggctttaattctcgttggcgtgatgtcaaagcggcagcacaggaaaaatatcctcatctgcaaatagacttcacatttcatgatctgaaagcaaaaggtatctctgatctggaaggcagcctggaagagaagcaagcaatttccgggcataagacccacgacagacagcagcatatgaccggaaagttaaagtagtgcccgtagttggtggccagagaaaatgaatgatgatgcgttcagagaaaaatcatcttcggacgcatcttcggaaatgagaaagaatacgccaaaaaaccacccgaaggtggtttcacgacactgcttattgctttgattttattcttatctttcccatggtacccggagcgggacttgaacccgcacagcgcgaacgccgagggattttaaattctacgcaagatcaatgagttacatagcagtgcattgcgaaactttgctgacgttgaatggtcgtctttgcaaccactggcagaaaatggatagccgtagattgcgttgagcacagaaacagcacagggtaatcgtctacttggtcctgtaaaggaggttgttgccacacaagctaaagcgcttgacctgcccccagtattcggtacaactgtcagttagtaatatctgttctgtgaaccgctctctgaatgtgatccattcataatcagcgctacctttagaggttgaatacccagcccctggtaaacataacgttccagggggtactttgcgatgaaggatatttttacagcgtaaattcgtttccgggtccagtgcccaggttatttactatataagcatctattctctgatcattaaatcgccagcagtcaatggcaagatccatcagcaggcgttgccttgatgtgatgctttccgcagaccagtcttgatattcatatccatatttcagcttaaagcgatttaatgcagtgttatcaccaattgagtactgggagtggagtaatcgagtcatgatgatttcagagtttaaatattctgtttgttttttcaaaaaccagtcttcactcaaatcattgcagttattgacagactggttaattgtaccctctaataatgttacattaccaagtttgtagagataacttgttcgatttacatcagagaactccccgttttcaggggcgtttcgtaccgtctgaggaagaatatgctcaatttgcatctgctgaatagcctgctggctcttttccggaaaaccgcaaagatggcggatatgattctctaatctacccaatacataacgttggcgatactgaggcgtaaaattatagtcattaataattgagaatcgttctttaaattcatctaaacgctccacaacaaaaggtataagtgttgctgaaacaacatttgcaacctctgctttcgttttcacatcccgaagctttacagcccattgagtaaagcgttgctcatatgtcttcgattgaatagccattgtatttgtaaagaataaaaagctctcaagttgagcacctaagaaatccattacatcatctgaacaactaatatccaatgccattagtaaaaccaaatgctgacgtgagcgatatttattaatatatccaatgttacttacgtttggaaaacggatattttcacgccagtaggctgcttcatttgttgcattgaccaggttagcgtatcgttctgataatttttccaattctttgacgaggaccatagggcgtgtcttatactgcaacgacagttccccctcagctgaaatgatccatttatatatatcatcttcacgcaaaatcccgtgatgatatcgtgccatcagaaagtaacgtaaaaaacgaagcgggttatcactttcgccgcaagactcaaggttattagtgatggatttccatgttgtctttattgccgaaaactgttcttcttttatctgactgaaaatcaaatttttaacaagatccatagcattaaggctggcaccacgctgattgatcgtttcgaagatctttaatgcgctacttaagttctctgattcaatgacaaccagctcaacttttgttaaaaaaaagcgagcgaaggagattaatccattcaagctatcttgcaattggtatttaagataatcacgaatgtgatcatacgcgtcagccattttttttactgaagctgtttccgcaaaggtattggtttgcccttcaattaaccgcgaaataaatcctcgactttcttcatattgaagatctagtctaattagattttcctcactattaatatcataactagagagccattcctcaatagttttcagatattccagcccttttttgtcaagtgtatccaatctatcttttaatagatcccgtaaggcacacatagtgatgacaatagtggtcaaccgctgctgtccgtcaataacatcatgcttttccccattctttacgataataacagaaccgagaaaataaccattttgatctttctgctctggttggtattcattgtctaaatccatgagaaactgttcaacctgatcatcaaccttccatacatactcacgttgataatcgggaactaaaaaataataatcgcttaattttgatatattttttacatcggcttctattttcattttatatccttacatagctggatgaacaccatagatcatactgatcccagatccaattcacaaacgaacaggagagtagaccccttctacattacagctatctccgtcatcaaaaatcaactctcctgcactataaccatccatggataaaatagccttttcattgagagccagactaaggcacattgatgtttttatcatattatctgtaccataaatctcataccagttatcttcttttttagaaacctctacctcatactttcctgagtcaatattaaccatgctaaatacattatctacatcacatgaatccttgctatctgtaaaaattatttttttatcatagccatcaaccctgagatatgcgtcttcagaataagcataaacataacaatatttagtattaacaaaagaatccttcccagtaatttgatataaattactatcttttcttgtgacatttatttcccacgtattggcatgaacataacctggagccaaaaacagggttaataagaacggtccaatcttggctttaaagtttctaacaattttgaaaaacataaaaccccttcttatatagttctgtaatatgttaatttagctgggctcttactacatatcagccaacaacatcccagccatgccatccagccgtttcttgaccttttcccacccaggcataacctgccccatcaggcggtaaaactcttcactgtggttgtgctcagccacatggcataactcatgtagcaaaacataatcgatacattctgaggatgccttaaccagccatggattcagggtcagacagccttttgctgaacagttgccccattgcgtttgcatcgcccgcagacgtatcggaggacgctcactgacccaaagggtctgcggaatcagtaaatcaagcctgcgctgaaaaacatctctggcacgttcccgataccattcagccagcaaggctttaatcttttctgccgatttgtgtctgacagtcacttccagacgcccacgcaacattttcactcgttgcggcacagtagcgtcttctgtcactttcaactgatattgcttaccgagataataatggctttctccgctgacatactgacgcggaacaatgtgtgtctgttgctccctgaaatcacgcagttgctggtatatccagcgcccacgttttttcagcgcagacaatacctcgtgctccggtgtttcaggcggtacagaggccacaacccggcagtccggataaaccttgatgagcaccctgccctttacgacctgacgcggaacacactgtacgacgatgacctcatcaccatagacaatgcgtaacgctttcattgatggcgattctttttcactcatgatttcatcaaaccaacgcgcagtatctggatgatggtttccacaatacggttaacctgattcattccggcaccaatttcccggcaggccgtaaacagcagtggtagcagacttgtcttaacgactttctcaatgtcctgggggttcagggagttttctgccaccgctttgacgataatgttgtccacttcaaaagccagcttcgtccacttatcctgcacttgaacgtcttttaccacaaaaacctcaggtagctcttttttaaatacaccgtaatatgcctgagcatgcttgtttaccgccaaagcatccgggatatcactgagcttacgggcttcaacctgttcttcaaactcacggaataagaggtactgcttaagtggatggtcgaacagtttttcagcctcttcgattgccatacgcaggagtctggaaaaggcctcctgagcatacggatcatcacgcagctcctgctcaatcatcttcgtcacacgggttttaatgatgtcggtttcattgcgggttttattgttatcccactcttcgggtttttcgctcttgcccattttaccgacttcatacacgccatccggttcacgaacctcaacgccggtaacatgcttatccagcaattttttcacctgctcagcgtagtcgtcataattgacctgctctccacttacctgcatcgcccactggcgaaggctggacatctgttttacggtttctttatagagatttcggtcttgttccgtaaagctcttgtcggtgaagaaggtagcggactgcagtgccactttcaggcatccggcaaaggccgttaacgcctcgaagaaatcatcacgggttttctgatggatatcgaccatctctccgtcacgttcttccattttaggcaccagtactgcacgtaactgctcagtatcatttttgtttttaacaccggcaaatatggcccacaactggttatacagatgcggcagacgtttatattcagagctcatggcgctgtacagcccgtcaatatccttgatgtcgtatcctccctgggttcgggaggcgagatcctgatatttgccgatagtcgtgtccagttcagccagaatgccgcgataatcaatcagcaggccaaactttttcagtggatgcagacggtttacccttgcaatcgcctggataaggttgtgggacttaagcggcttgtcgatatacagcacggtattcttcggttcatcaaatccggtgagcagtttatcaacgacgatcagtaatttgagcttatcatcagtatcgaaacgactgatgatattgcgggtatacacagactcatcctgcatgccgacgttatctttccaccatttcgtcacttccggcagtttgctttcatccacctcagtattcccttcccgggtatccggcgggctgataactacagctgactcaaacaacccggcttcatcaagatactttttatatttgatggcggaaatcttgctgtcgcaggcaagttggcctttcagcccctcatcaatattcttcgagaagtgtgtggcgatatcgagtgcgatcagccggatgcggtcatctgcactgtagacctcacctttacgggcatatttacgtttaaggtcggctttttgcgcttcgcttaacccatcggtaatacggtcaaaccaggcatctattgcccgatcgttaacctcaaggtcgggaatacgttcttcatacagcaaaggtgtaacggctttatcttctaccgctcgctgcatggtataagcgtggacaatcggcccgaatttattggtggtcttatcttcttttagcaatggcgtaccggtgaatgccacaaaggcggcgttcggcagtgccagtttcattcgcacatggttctcacccccctggctgcggtgtccttcatcaatcagaacgatgatgtcggggctggtattgacgcattcaggcaattttgtcgctgagttaaatttctggataagggtaaagattatacgttctttaccagagccaatctgctgtgccagcttctgacctgaggtcgccatcgctttggccttatcatccttccctgccagttcgccaccagagacaaaagtgccgctgagctgcccttcaaggtccacgcggtccgtcaccaccacaatacgacactgcttcaggctgtcatgaaggatcagcgccttgctgaggaataccatggtgtaagatttacctgaccccgtggtatgccagatcaccccaccttccctgcccccgtctggtctgcgggtactgatgcgttccagcagtctttttatcccgaacacctgctgatagcgggcaacaatttttccggtttttttatcaaacagggtgaagaagcgggtcatctccagcagacgttccggtgaaagcagactgatgagcagcttatcctgcccgctgactgccagttcccccccatcgattaactgttgataccatttgagatcgactgaaggacgatgatcaaacaacgcatgaatttgttcagtcgataactgatggttgcgcagcgcatacatctgcggatcggtaatatcttcttcgcgccatgccgcccagaatttcattggcgtatggcatgtaccgtagcgcccgtcatgaccgttaatcgaaagtaataactggctgtagacaaacagctgcgggatttcatcgttgaactggttgcggatactctgggatatcccctcgtcaatggttggccctttcttgccatgaccagccgggcttttcgcttcaataacagccagcgggataccattaacaaagcagacaatatccggtctgcgggtttcaacaccgcctgaccgcaataccgtaaattcttcagtaaaatggaactggttattttccggatgttcccagtcgatcagcgcaatggtggggttgaccttcttgccatcgacaaattcggtgacggcgataccgtagagcagatggttatacatccgttcattggctttgagcagcccttcattcagcgccggagaacagacctgtgatatcaggttatccagtgctttttccgataactggcagtttttgccacccgccataaaggaacgcttcgacagctcttcacgcagaaccggacgcagcaccacctcatcctgtttatagccccggtaatccataatctgtttcggagataaaaacgtccagccgaggctggtcagtaacgtcagtgccgggattttggcgctgtattcttcctggaatttaggttggtagtgcttatccacccggtaatccttcttggctaagaggtgaaactgtatgtccttacggacatactcaaaatgaacgaagacttatgatgaaaagaacggcgagtcccgataaaggcgattgtacttgacctgttctgtttcgcccttgtttacattaccaaatttctcctgatgcgtcgtacagcaggaaccacaggatgcacaaataaatcgtccttctgaacatttttcatgcaaatccctggcgtcaattatttcgctgcatttgtaaccaatacagtgattaatgtaatgcccgataccaaactgttcgcacgaatgactggcacatttaaagacggtcaggcgatacgcggcctggaaaggttttttcacaaatcctttcgactttgtatcccagacgctgacttccacacgagcatatttcatatctggaaccatcagcaccccacaacttcggcaatgcaagcgggaatgtaattctctgatacgattgaaatacccagccagtttaattgggaaatcccgcttagaaggttcgcctgcaatcagataggtcatgccatagtgggcaagccagtcataaatagtgaagtcgatgtaatcccgactgaggtcgggtagtacctgcggatcatggcagattttcgaacgacaaaggaattttttctctatcgttccgtcaggttgttttgcattccagtgaaatgcctcacaggataattttaaattccgggaacgaattttcaatgagctacactgtgggaacaatttgaaaacagaaggatggcttaccgggattttacccgacaacactccctgccatatctcatgcagaataatactcagaacggactgttcatcgttacgcccaatcagcggtaacaatttactcagaataaagtattcagggtcagaagaaatttcagtattcgactcaatatcattaacaaaactgaaatctttcctaaacatcttctgtttaatcagatacttattgacaaaaggactaatcacggaatgtttataaaattgctctctcgatgagaatttctgctgataggcatcacggacaaatggttgtatatccattttatttttcgtgaaactacgtcgaacaaaattctctatatcatcatgccgatgttcaagaatccgctcgctgcttatacaatcgtaaaatgccaggtagagaatagcacttatagatatatggctgagtaattcattgatgatgtccgatgttgaagccccctggcaatctgtagccgcagaacaccttttcacccaaacagcgaactgatcaatgttattatcaataaatgacgaaggcatgaccgcaggagatatttgttgtgcggtcaaatcatcaaaattcttatcagaggcgaaaagtgcaaactggttatcgtagttacgtgattttaaaaatagcggcaagacttttgtagcagctatatcactggtaactaaccgaattatagccctttcgccaaaggactgagtgagaaaattaataacgcagtcacgataacgccaacgagcgaaatcaacgccctcctcaataatagcccggagatattcaataaggagctcagccgtctcctcatctgttttatcaagaatgtgaacattaaaagccgtaggcttaccatttttacctataccttccctgaacagcaccggtgcattgtcagcgggtgtatagttccggcttatctcattcttatgaaaaaacagctcattaccattctctgataagagaaagccaaagttattctcccgatccgttttgctgttgtagcctccgaaccagagaacatttcccatgtaccaccgggaacgatccagattgttcactgccatgagcaagcccccttccgctttgtcagtgcaggcagcactttttaaattttttaccactgccacactgacacgggtcattacgaccgggcagtttttctgcccccttcacgggaacaggccgggatgatgcctctgacattctcaccgacaaccagtgctggtaaagcgccagtgccgcaggctgaatgagagtaatactctgttcaaattgaacaggtgacattttctcaaccactgggaagttcttttcaataccatgaagggctatcgcctccagcgagggacgtaaggcctctggcaaggctgaccagtcatccagagaccggcctttcatatacccgaaacaccactcttcgacgatggtatatgtcttccccttcacctcacgtccattgaaaatcggttcaaactgttcaggggcctcatacaggcagccagcgatatcgttcatatgctgaaaacacagccccacaaaacgcgtcatctctttttcagtggtccagcgagggtggtaatcacctcgcccccagatagcactgagccaggtattaggggaaatcgtattcgggccagagacaatcgccgtcagaaagccatccagctcagagaaacagagcacagagtcatcattgccgtatttcatcaacacctcttccagccagtcgatttcccggtcaatcagcggcccgcttttcgtcagtttcattcggcaaccgcctcatcgaccttaacacgacgtttgccagtcagtagctgttgcatcagggcttttttctcatctctcaggcaggcgagttttttctcaagtgtgtagatttcggcgtcggctgcggacaacacggtggcgatcttttgttgctcttcgatacagggcaaattaatgatatgcgttttaatgtttccggttatttgtggttgaccggaaccggatattaaatacttcagatcactgccattcagagtatagaatagaaattttttactcacgtaggaatagttatccgtattgataaccattgcatttccggtaatccacgattttgcttgagtccaattgactatgccgcatgtgctaccccggcaagttacggctatttgttcagtttcgtggttaaactcttgataaaatccaataactccatttgcgccataaactggataccccgaatcagacatcatagactgggatattgtttttggttgataaacatcagctacatctgaaagaagttttttctcccatttaccattaaacctcaccccattctcatccagcaagcgtttttgtccggtaagcaattgctgcatcagggcttttttctgttgctggctgttggtgagaagcttttccgtcaccgaaatcgcctcatcccaggttgacagaattttaacgattctcttttgttcagacagtggggggatattaaatggccacttaaaccaactatctaacttaaaaatcattttctctatgtgcacaccaatgctagagtggaagcaggtttgctggaaatatagagactccgatagaaattccatataaggaagataaaaaccggacttccctgtaagcacacaatattcattcgatacaattgagccagaaagttctttaggtacaagaccgcaagcaccgtgcacaatttgtcgttttgatatgagaaagtcgccttctttaatatagaattgactttttacggagatatcttttcctttaagatgctcacgtcttattacgccacctctggagcgctttactgtaactaagtcatactcttgattatcttgtatatatgcctttcttgcctctatatttaagcacttttctaatgataacttttgccatcctgtaggtagcattccaaggatcggttttccagctttaacgctcactgggtaaagcgaatcacgagccataacccaactccttcaaataccctgccatctcaacttccagcttcgccagttccaccttcagttgctcacgctctgctcgcaccgccagcaggtcaatctcatcctcttcttcaaaggtatcgacatagcgcggaatattgaggttgtaatcgttgtcctgaatttccttcaggctggcaagataggcgtatttctcgacgttatcgccatcacggtaggtcttgacgattttcttaatgttttcttcgctaagctggttctggtttttacctgccttgaattcacggctggcatcgataaacagcaccttgtcatcaactttctgctttttgaaaatcagaatcgcagccggaatccccgtaccgtagaacagtttttccggcagaccaattaccgcatccagcaaattttcgtcgatcagtttctggcgaattttaccttcgctggagccacggaaaagcacaccgtgtggcacaactacgcccatacggccagttcccggtttcagggtttcgatcatatgcgagataaaagcgtaatctcctttagtcttcggcggtacaccgcgacgaaaacggccaaacttatcgttctcggcctcgtcatggccccacttatccaggctgaacggtgggttagcggtcacgatatcaaacagcatcaggtcgccatttttatcgagcagcttcgggttacgaatggtatcgccccactcgattttatggttgtcttccccgtgcaggaacatattcattttcgccagcgaccacgtagaaccgatcgcttcctgaccgaacaaggcatagttacgactatcatgcccggagacaattttacgcccacacttcatcaataatgaaccggaaccacaggctggatcgcagatggtatcacccggttgcggatcgagcagttctgcaatcaggtccgaaacttccggcggggtatagaactccccggctttctgcccaccgctggcggcaaagtttttgatcaggtattcgtaagcattgccgataacgtccagcgtaccgacacgactcggcttcaggttgagatcttcaccggcgaagtcttccagtagctgacgcagtatggtgtttttctgtttttcttcgccaagacgatcggtgttaaacgaaatatcctggaacacgcttttcccggcatctttcagtttggttccgttggcttcttcgattgcatgcagagcctgatcgatacgctcaccgttacccggctcatggcggcgttcgtacagcgcatagaaactggcgcttttcggcaatacgaaacgttcattcgccatcatggcttcaatgagttctggtgcatcaccatactgttttttatattcatcgtaatgatcctgccagacatccgaaatgtacttaaggaacagcatggtaaggataaagtctttataggtatcagcactgatggtgccacggaacgtatcacacgcggcccacagggctttgttgatcgtgtcctgactgattttgtcgttcatgaatcatcctggtctgaagaaaagcctgcgatgcagggcattgcatcttaaaaattgcggtaaatgataccgtaagatgcctcccctgacacgccaatatcgcagcattcaggtttgcatcatccccgtaatatcgacatgagacagactgacacaacctggctcgtcactcgctaaaaaccaattatcttagtaagacagcatccatattagccatggtgtaaaactgccgttggggtaatgatgatccatatatcacccattctggtgtgtggggctgacatgatccataatcggcaacgttgatgccctttgattgtaatggtggccgtcaatgtgattcccctgttgactggaggtctccggatagaatgagtattgccaactgcgctatcggcccactttatgatgagcaaataaaaaaaacacttatgtatgctgaccataaattcaagcggctggtaaatacacgaatgtcgttactcgaacatttatcaccccactatgacttatcttccatgttcagctatgagttggagggaagagtttttcggattaaattgatcaagcctgagattaaattatctcgccagcagttgatcttctcctcactctttttagagcaagattttctaaaagaatataaaaaacacatctcaaatactctacaaaaaacaatcaaacagtgcattaaaaaatacaaacaaaaaaatcaaaatcgagccttctattttagattacatatcagcatcaccccgcaatacgtcgagttatgtattacatgagatagtttctcaatgtgaacattgcgatgaaattcgcaatattaaaaatgatatattgcttgatgaactaacgttgaatggccggatcactaacatttcaaaatacattaaaaatagtcaagataaaatcgtcgaacatatagagttctgcactcataaacttgtcaatataagtcgtaagaatcgtcacattttcaacagcaccacaatacctggtagaaaacctaacatcactggtgttttactttgcctttcggaattgataagcaacctgcatatttacccaactgaaattaataatataagcaatgccataatattaagcattgtatactctgtacttcaacatcttcaatctggaagagaaacagaaaaaaccaaaacctctccagcactgaatttcatccccaccatcatcgcacctcatgttttctacctggcgaaacgcgaaaaatcctctcaatataaatacattgaaaaagaatatcttctcggccagttacttatatttttgatgtataaaacagtttactactcgattcatagcatcagggtaagccgtaagcatttctataacgatataaaaccaaaattaatgacactaaaaaaagaaagcttattaagcaccaatttcatgaaaaatcgaagagagattagtggtgaagtctttggtgatgttggtagtattgaggctgattttcgagaaatcagcacattgattcatcggcgaaaggctctgtttatttccttttaatctttagagaacactatatcatcgtgaagcagagctaatttcagccttgcatagatcattatcaatgccatagacagtgttaatcatatgacatcgttccggtattgatactgattatcaggccttggttttatgtaatttaaacaccaccatctctgaaaccccataacgctcacaatttaaccataaaaactaaccggtttatacccgctaacaaaatcaataacatattgaatttaaataactataaccattccaactacagatgactggcttttatttatggtatatgtccaggcagaatcaagcttgcgccctctaccactcacgatttaggatttcctcactaacacagcatgtttcattataaatcaatgtattaatttaaacgaggataaaccatgttcgagaaaatgaaaaacaatgtaacccgtgtaccggggaatttaaccatacttaatcaataccaaaaagacattgatcacctgtctaaattattttctgaacagctattactggatctaatgacgactaccaaccctaatcaaacattgcaaatgaaaccttctgtagatattcttcatgtactatctccatcagcatccactgctaaccatatcattttttttcagcacgtcccagtgatcgaactatggttaaaaaaggagtgcactgcctttaattcacttgctatttatttctatgcacagcaatcccgtaaaaatgtcattccgaaaaaaaacctgtagacaactggacgtatttattaatactgaacttgcatctgcggttaatggcaatagtaattctaaacccctttttcattttctaaacaccctgaaaaagatgtgcaatcctttaacatttattgcccacgcagttacggaacaatctggtcaagttgcaatgcttgatttcagcgcaaaaatgcatgaatatactgttgaaatcaggacctttttgaagtctgaatactggctaaacaaactacctaaggatattaacattccagccattgacctatcctggcttgtgttttgttacttttgctctgaatatctttttgtatttattcaaacaacgctcaatacaatgaaagcaggaaaaatcattcgtgataactacctttatcatcctaaaatgatcgcattgatcattttatctatgctgccttatgaagtcattcgtaacgatgaatcactgagtgagtttaaaacaccattaaccagccctgatgagttcataatcaaatctatttgcattaaaggtaagcaaaacactacagggcataaaaaagatatcgaacaattgcttcgtaagacatatatctatattgcattactcttaaactctgagtgggcaccatcttccaaggagttgatttcctttttatcaggaaagtccacagtgataagtggttcactcaacttccagtcaacctccagtggtctgggtgttcaaacaaacaatataactcttcttaagaatgaggtttacttcgaaaaaatagcgaacaagatcatgaaactgtagtttcttaatataatggcgacatggaattgtgttgccattatatccgaatctgcgttttttcacctgatgaactgtgaaagctgtaactggcagactataacctcacatcgtatttttccagtgtcatttacaggagaaatacgatgcctattctggatctgcgtttcagcaacaaatcaattcaccaacttccacatcccctcacgggttgtcaggaataccgtgatattcactgccaaaacctgcgtgctctggtgtatcccaatcggatcacgctggcctttcgtgccactataaacaatcagcgtatatatgaaaccctgggtcagttccctcagctctgcgttgaggatgcccgtcagcatgtgatgaaactgcttgctgataaaaatcgtcttgcggttcagtcccgtcgattcactgtggaacaggccatcaatgacctgtggctaccggatttgcagttgtataaaaagagtcctcagtcagagttgtcaaaactcaacctctacgttcgcccgttctggggcaagcggcaacttcgcgacatcacggcaggagaactagaacaatatgctgctggcttacgggaaaaattacgtccgtcaacagtaaaccgtatcctcgcaatattgtccaaaatatgctctctggcagtacgtgctggatggatcacacattccccgatgtcacatgtccgctatctgaaagaaaataacattcgctatcgcacactatcagcgacagaaatcccgcgctttattgacgcggcaacagcgctgcaaacaccggcagctgattctatattgcttgctctttatacggggatgcgtattggtgaggtatgtaccctgaaatgggagtactggcacctggatatgcatcaactcatactgcctgatacaaagtccggacaccctttcacctgcccacttgcacctccagccattgcagttgtccagtgccagcaggacctgatgctcagcaaaacttacatttttccgcgactaaccgacaatgcccgccctctggcatatccgcgtgcaacctttgcccgtatttgccgggatgccgacattgataacctgcggatgcatgacctgcgccgtacctttgccacccgggtactacaggcgaccggggatattgcaatcgcttcccatctgctaaatcaccattcactcacggcgacccgtcgctacgcttttcacaatgcagcgacatcacacgcagtggtttctcaggtcattgaaagttatgacacgaaaaaatgaaccaatgatctgtgattcgtgattgatgcaacactcgtttaaggacggtattgtcattgcgtgcttctgcagggccctgcattaagtcatcacagaatgtggattgatattaaatccgcgtggcttcttattctctgaaaccggaggtttatgtatttaaccattaagcagttcgcagaaagatttaatctttctgcatccacggttgcgtcagatatttctcgcaatcccggaaaactcccgcccttcatcagaattgggcgggctatacgattctctcttgacgatattgttgattgggaaaatgcacatcgtcaaaacaaacttaaaggtgatataaatggttactaagaacacggaaaataacgctaataatgcactgaacattcttcccgaatcagcaagcacagctgtagacaacgatgaaaaatatctgtcctttgcattagttctcgctatcacgattatgggcaacttagtaaagctcatcggcacagatggcttcatactttatacctacaccctgcaggacacggctactgctcgtgctgtttttaatgaattagccaggcgtctcaaaaatttcaatcgtcaggaggaggtctacaccaccgattccctcacctttcgaatgaaatacatttacggtgttaccctgttcgaacatgatagtaaatctatccttaacctttttgataagaagggttatccggtattgagtgaatcaggagaacccggttctcttgatgatatgtatcttgacattcaagcccgattacatggcggctacgcctcaaaaaagtttcttcatttacatgaacattgtctgttatctgcacacgttaccccgtctgtggaaaagacgcaacgtggtatcctgattaaagcaggcaggaaactcgtttcctttatctatgcagataatgaatctcgcaaaaatgatattttcaaagctgtagtagacgtcattaaatcctgattcattatgccgggggggacgaactcccggcattttttcggagttaactatgagcaataatttgcaggacatcctcgctgccgcatcggggtatcagtccgtgacttcagagccagcgctcaatcttaaaagacctaaaacgcttgatgattatcctgtgataccacctgcatcaaaaaaagtatctgttatttcaagtgacctgacactccatatcggttttgataccgaatatgttttcaatcctgaaacacaacagaatgatattctgtcatatcagagttatgttgtcttacccgataatacaggtatatcgaacattatctatccacctgactcacagaaaaaatcccggctgtcttttaagaactttctctgtcaaacgattacaccgcttcttgaaacgggtgtgattacaaaatggcccggtattattaatatatatgcgcatttcattcgtgcggatatcacctcctttgccaatttctggtcagactacaaaattcttctgaaaggaatacgcggtactgtcagcagcttcaaaaatcgttacggtatcgattttgatgaacagcaggaacgtcgcgtaaagactgaacagataatgtttgacaaacgaacttcccctccgcgttgcagtaacgtagctttcatcgatacactgcttatcactcccgggggtatgggtctggctgaatgtggtgaattactgggtcttcccaaactcaccattcctgccccttattccataaccaatatgcgtgattatcttctgggcgacagagcagggtttgaagcctatgctctgcgggatgccgagattgcggttcgttatgctttacaggttcgcaatttttgcgcccgggagctgatgattgatcgtgtccccgccaccatcggggcgatggcagtttcacggttcaccaaaacacttaaagaaaacaatatgtctcctgaagtctgccttgggacacacattaaaacccgtgaactctggctcacggagaaacaggcattccggacgattaaaaaccccgccagtgttccttcaagagagctgtttgaaacgttcccgatcaactgttaccacggcggacgcaatgagtgttttatgatgggggttacaccgtctgatcactggtatgactacgatctggctggagcgtataccaccgggctattagatatcctcatacccgattacggaaacatccgcctcagtaaaaatccggacgattactgtgggcatgtaatgggatttgcgcttgtcacatttcagttcccggaatcagttccctatcccagcctgccggttcggaccgatcaatatgggttattctttccattaagtggcgaatcatgggcaacggcacctgaaatcgaacttgctctgtcgctcggggcagagatgacgatccataatgggatcatcgtcccctggatctgtgacacctccccacataacaacgaatcaacatcggtgtttcttccctttgttcaacaggtccgtgagaaccgtaatcgccatattaaaggttctctggaggagaaattctggaaagaaattggcaactcgctttatggcaaacttgctcagggccttcgcgccaaaaccgcctttgatactgcccgtggattaaacagatccctcccaccatcatcggttactcagccattctttgctgcgcatgtgacgggatttatccgcgccgttgtcggggaactcatgaatgctttgccttctgattcatcggttgtcagcgtcacaaccgatggctttttgacaaattgcccacttaacaagataaacatgagcggtccactgtcttcccgcttccagtcgctgtgcgatattgttgatccgggttcatcaatgttgacatgtaagcatgaggtcagccagcttatcgccatgaaaacccgggggcagttaacctatagagctattcagggaaaacctgttgttcatgccagggctggcgtcaaacctcctgccgatattccacgcagtgactataacgactatatggtagatctttaccttaatcgtttacccggtcagacgttatcccgaagtacgttgatatcaacgcgtgagatgtggctgtcggaaagcgatctggtatcccgggaacaggatatccgtcttaatctggaattcgatttcaaacgccagcccgtacagcccgccatgaatgaagggcatttactgatgtcttcccgcccatgggataatatggaagaggctctgcagcaacgctctcttttcgacgactggcggcaaacgcatacactgaagaccctggctgactgggatgactggtgtgattttctctattgccggacggtgttttctgatatgaaactaaaagtcggaagcaaacgtagtgatgatattttagtcagactatttctccgggcgctgactcagtgccaatgggggcttatgctgaaagataaaaaaagttattcctgtaaagaggttgctgaatggctgacgtcagaaggctattcagtaacatgtcaaaaagcacctgctggatctcccgggcccgaaggtcgcagtaacgtatcttccccagacgaggttcaatgtattgcgtgaaacgctgaacatccttatcccaggactttttatggcgtttgatgaacggaacataggtctggtgaaaaaactcactaagtgttgtcacgaacggtgcaatagtgatccacacccaacgcctgaaatcagatccagggaatttcttgggctgcatccagaagggaaagaaattggcgctgacagttcaggacggccagtatggattaattccccacccccttcaaaagaggatgaggtgttgacggctgaaatgaaaaaaatatctttggtttctgaagtcaatacctacatcaatacccatcagtggcctggcaaagcggcgattggtcgtctgaaaagtgaggaactggcgcaatataatttgtggctggattatctggacgcactggaactggttgatacctccagtgctccagatattgaatggcctacgcctccggcagttcaggccagatgacatccggcgcggtgctggtatctgttgccgtcaccgtgtcaatgtaatccagcacagcgttaagtcgggtgttttctggctgcgtcagcttccgcccggcctgtaatttcagttgaatcagactaatggaagccattgcagtatcaatcagtgactgacgctgtgcttctgccgcgcctactgcggcgctatgctgtgcctcggtatccgtcacccatttctcaccatcccatttatcgtatggcgttaatggggcgatagtggttgtattttcagggtaatcacccggaactgtgatttctttggtatctcccgtttcggtactatagacaacttcaccgcgatggtctggcacatattcccatgaatttaaatctacagagcgacagattgcataaccagctttatgtgtacctggtgcatccagacaggaacatgccgggataccgacgccgacagcgagatattcagttgatgtagaaatatattcccgcgtttcgccatcataattataaacggtaatatctcccgcttttatggcaatgagttcgctatttaatacagctttattcatcatgcggccctcacaatataattaaaagcgatgttacgaggacgagtttctgtacctacattttcactaatttcaccataacgtttaacactacgagagctaatagctcgtagtgaggaaggcaccttaagaccgggttcgtccgttttaactattcccccgtcaccgtatgtagccagtattcctgggtttactccttcccgtgtacttcctgcggcaagcccgtcccctgtccataattccatatagtgtgcatggtccaaaattgtgtgtggctgccaattaagcaaagcgcgaccagtatcaatcccgcgaccgtcatcccagccacgaataaattcaccgcgtaaatcaggcaatttattggtcgggtaagcctttgccagttccgggtattcttcagcagaaaaagccgcaccgttgcatttcagccagcctgttggcggagtggcggaaggccacggaacaggcacaccaacgggtaatgccgaaccttctcccaaaccaaggtatgcgagaagaccagctacatcctttccactcaaatgagtcagcgtctcatccagtggctgcttacctgacagcgcattgttaatggtggtactgaatttcgggtcattgttaatggctgcggcaatttctttcagtgtgtccagcgtggctggcgcaccgttaatcagagcggtaatagcggcctgaacaaacgcagtggtcgcaatccgcgtggtgttatttcctgcggcaggcgtcggcgcttttggttctccggtaaatgtcggattatgtttctgtgcatactgggtatgaggatccagtgcggcaatgtggtttctcatctgttcatccacatacagccttaattccaggacttcatcatccacgtatttacgggtcgccagtaccaccgacgggtcgattttcagcgtgatggcttcggtattcgtgacaaccagaatcatgcggatagtctgggtacgaccactgccttcctgcaactgcggtttgtacgtttccgggcagttcgccaccgcaatgagtacgccttcatcatcataaagcccaatctcacggatccagaatccgccctcgttctcagggatgatttgctccgcaataatctggctctggttgttcgggtcaacactcagaagattcagcggcgcgatgcgtttctggttaatcagttttgtctgtgccgggtctggtgtcggcaagacaccattcgcatcaccaacggccatttgcgtcagattcagcttactgccgagcatcgtcgcgttagccagccgtgcagcgccctgattagtcagaatggcgtagtatttcactgtcatgcgtttactctcaggttatcaattaaatgaatggccgaggccgggaaataatcccctccgacaataatggcctccggggtgtagggataaaccgtcagggcgtcgccgtgatagcatcccgcaccggcaaaaatgttgccggttgtacttaaactgatagccagtcccgtcagatggcggcttgccggttttgcatcagcaacgaggcgctccagctcctgatacatttcctcggtaataccctgctcaagcacgccaacaacgatacggaacgtccccggctcctcgttgagttgccaccactccctcacctcaatcagatagccgagcggctccaccacacgccggattgcgcctatagtgcccttatggcagtgaatgaaatacgcatcgcggataacagtgcgttttgtcgcttccggccacttatcatcccagcggtcaaccgaaaatgaccacgccagccacggcagcagatttgccgggcaggtgtccgggttccacagctcacgaatactgaccggcgttttttcaatttccgcacaggcttttgcggcggcgacttcaagcggtgatgagccggtcggcagcagtcgcgaatcactcatccgggcctcccgtcacgacgctgtattcggtacagaaagacgcctgcgtactgttgagcacaatgtcagccagaggtgcagtcagttcgacacgctgcacgccttccacatgcaaggcggcataaatggcagacagacggatgtcgcgcccaagccggtgctgtgccgtgatgtacgcttccagttttttcacggcagcagcgcggatgggttcgctttcgggaccagggtaaaggtaaagcgtggcgtttatctggtattcaacgatggcggcagactgcacggtcacgcggtcggccaccggcctgacgtcctcgccattaagggcgttacgcaccacagccagcaggtcttcggatgcgacgccgttattttcacgtgacagcacagagatggtgacacaggcaggagacggactggtgacagagatatctgcgacacgcccgtcggcacttcgaccatgatactgataggctcccactgacccggcgacgcttaagccctcaaaagcctgctgaatacgcagacgataatcggtgtcagattccatcactgccggtgtcggcgggatagtcgaatcatctgccggggtgataatcaggcgcgtggtgttgtaattggcaccaatcacatcaaggtcattaccggcggcacaagccagcatcaccgcccgtgcggcctcattcacacgctgacgccagataagctcacgataagcattttcctccagcagtttgacgagaggctcggattccagcgtcagggtacgggcgaccgcctcctgctggtcttccgggtaaagggaaatcagtgtcgccttgcgttcggcaagaatggtttcaaagtccagctcctcgaccacatccggtgcgggtagctggttcaggtcgataatcggcatggtttcaactcacagggatggttaacgaaagtggctggccggtgtcgttgtgctggccggtcaaagtgacagtcattcgcccgtcaaaactgcgctcagtggtgacggatgacagggttacgcggggttcccatttcagcaccgccatgtaacaggcgaccttaatctgcaactcaagcgccggggtctgcggctggtcaatcattgacgccagcaacgagccgtaatcacgacgcatcacccgtgagccgacgggggtacgcaggatatcgccgatactctggctgatatgctcaaggtcagtgacagtcaggccatcactgcgattcattccgagataacgcgcagtcatagaggtcccccggttgtgccgccgctgtcgccggggtgtttatgggtatgcagtaccttaccgtttgatgagagctcaccgccggtgtgttcaatgttgccgcgcatcgtcccgcccttctgcacttccagcgtgccggtaatcagcctgttggtgcaaaccacctccggtgtgtccagggtgacgcgggttgatgctttcaccatgaccaccggcaccgtggcagtaacagaatcagaagccgtcacgctggccgttttaattccgcttaccgtgagtgcactggtttcaggttcatattcaatcaccgccccgtcagggaaacggatatgcagggcatcagacgacgcagacggcgcggggttatcgccggaataaatccccggcagaacgaacgccgtgtcgagttcaccgcccacggccagaatcagcacctgttcccccacggaaggtgcccaccatgtgcgcgaacgtccggcgcgatgggtcagccactgaagccagtcagtgcacatgccgccggtctgcacacggcagcgaccggcgttaaggtcggtttcgacgataatgccggtgcggatcatgttgcgcagtgcgcgcgcgagttcctgaatatttgcgagagtgttcataacgggaaggatgccgccgggtcataccggcggcaatgtgacgatgaggtgtcgggaatggcacaactaacggtcgaggtgagccagaataatctcttcaatcatctgcacatcctcaccggtaaagccgagcagaggacgcgccggataatcaattttcttaccgtctttccggttttcttccgacagaccgaactgatgcacactggcgattttcggcgacttcccgccgtaaaatcccattgatgcctgctccgggctggcgcggatatgcaaaaaacgactggtaataagtttcgcaaacatttttcgcttaacgcgaccggtcttttttctggcgctctgctgctggcgtggcacgtagggtgtgccgtccggggctttctgtgccatcacccgacgctgctgactctgccgcagacgtttcgccagttcggcactcagtcgtcgacgccctgacggtgacagcgactcaatcagtccggtcagccggtcttcaaaacgcttaaactcattcatcccacttgctcaccagttcgccattgatataaagctccatcgggcgggtgaccggctccggcggcgtgggttccgggatattcttcacatgcagtgcgccgtcgacctcactgaccagcgtgcgctcggtcagcatcaggctgatgctgatatcaaagctgctgtcattgttgatgtctgcataaaacgtgaagccctttttctggccttcgtcggtggtcatgatgtcgggctgattttcccgcagccacgccagcaccggcacgatgagcaggtcaaaatcaccggtaaagtcggtcacaatgacattgagcgtgtaacgcttttcaaatgacatcgacgtcgccagtgtggaggcaatactcccgttatccacgaatatccgcagcatctctggactggttttcagcaccgtgacggcatcagtcagcgccctgcgcaggctgtcgggtttgagcatcgttttcgtcctgacagtgtttaatcatttttacctggctggcacagcgcgccagcgcgttctcaagctgccggatatcggcacttaaatcgccgttcttctccgggtcactgcccggcatcgggcaaagactcactttcgggcaggcgttgtggacaatcactggcgtcggcgcaggccgggcgctggtgcaaccggcgcacagcatcaggcaggtcagcaccgtaccagcggcgaaaatcttcgttttcattaagtaacctcgtgatggttttctcgcgcagtgcttcacgcttcgcggcgttctccagttcctgacgcagtaccacctgcgccagctcgtttttgtctgccctggtgagcgcaacatgaagctgatttttcagcatggtgatggtcgtcagctgttcactggcgacgttattcgccctgtccagcgaggcgcgcaggctggcatttttgtgtttcaccagaaacagaccggccaccgccagcgataacaacacgaccagcacaatcatcagctttgacatagttcccgcccctcaaaacgctgacggcaggccgtacgtatcagccggaagaacaccgacgccacgaggtaaatcagcgcagtaaaaatccacccggcagcgaccagcgagataaacgtcgccaccatcaccaccagagccgccgcccgtctgcgccacggcaccggctgcaaaaacagcgacgcgacaatcttcacggccagcgattccggcggcagctcccgcccgtagcgttccagcacatactcagtggcatacacgccgacaccaccggcaaccacacagataaccgtcgccagaatcgcccaggcggcgacaaaattgacggccacgctctgcgggtaaatcagggacagtgccagcatcagcgccagcgacacgttcagcatcagtgaaatggataatttcttcatggtgtttactccgtttaagccggtacgccgccagcggtacgccagacggtgaccagtttttccagtgaatgctcacgctgaccgtaaccggcacccggcagggacgcccagatattgcgacagcgtgaaatggcgcgctcaatgcgtcccgcccgaatgtcatccagtgcaccgcgttcgcggatcaactgaatggcaagtctgtcctgtgacaacggactgaaatccggcagggcaagctgtttgcggtaatgcggccagaacaggtaaagctgctgatagcgaccggaggccgtggatttttcaccgcgacggttaaacaccttcgccggtcggccatgtgcgaacgggtggtcactgtagtcggtgaaaatttccggcttcccgtccagtccggtgactatcacgtcatagccccggtttttcgtcagcggatggtttgccgtcccttcggacacggccagcatgtcgagaaaggcggcgatattctgatgcgtgttaataaccggcattacggtttccccctgcccttaaagcggcgctgaatggcaatctcaatcacctgataaccggcgatacccagcatggagccgatgccgcacaccgcaggcagtgacaggtcaggaaactgcaccagaacaacaccggcaaccaccgagacaaaaccaccgagcaacatgcgcccgataaacagacgcggggtgatgggttcaccaccggcaagcaccttgccgacaacaatcagcactccaatcataaaaagcgacaggacgcttttttcttctgctgtcatgcgttactcccacagattgacagtttcagccacgggcgcggtctgaacgtcgggcagttcgacggcggtgccgtgcggcagcaccgcgcccagttcagccagtcccggatttgcggcgagcacggtctcaaccacgccctcagtgcgcccgtaataccggacacaaatggcgtcgagcgtgtcgccctgtagcgcaaaggtcttcatcagatttgactcacgatgcagcgcggcttgtcctggatacgcgccactgcccagcgcatatcccgccacagctcatcaatggtgctgtcaatgctgtcggccttcttgtcgcctttcgcactggcatccacaccgcgataacgttcataaagcgacgcggtcgccatcgcacacacggcgcgctcgtagtaaaaaactttgatgctttcaccgtcgatgtcgtccgccgggacgtccgccagacgcgtaaaaccggcggcaattttctgttcgcggtactcgtacagctccgcattcgtctccgccatgcctgacttgatggcctcacgcagacgggcgggggcgacggtctgctcaaggcgcatacgttcccggacgcgcttcgggtcgatatcgggaaaaaagaacgtgtttttaatcaccggctcgtcgcctgccggttgcgggatgaccaccgtaccctcaccggacacgggagcctcctttcgcggaataatcagcgtcatcatgactacctctgaaaagtcgggcggtggacgccggtgcagtgtcaggtgattcaccctcactgaccggcgtgccgccctggcgcggggcgcattcggttgttaactggctttctttttcgggcgtccacgttttgccggtgtcacgctccggatcttacgcggggcgcgggtggccgctttgggctgcggctccggcttcggtttcagctcccgctccagtcgttcaatctcttttttgacgcctgcctgacagtcgagctgtgtcgcacgttgcaggtgagccagcgcaccggcggcatcaccaccgtcacgcagaaacagaccggtgattttgtgcagctttgcgcgcacttcatcaggcatgtcagccgtggcggtcagttcaagggtctccgtcagcaggcgggtatccacagactcaccggcagcgtgagcgcgcatggccgcgagcgccacctcctcggtgaacatgtacggcggggtgcggcggtgtttacccggcatggtcagaccgtacttcagggcataacgggcaatctccagcgcaccggcaatatcgccggtatccagacgccacagcatgaccgtcatcagaatgtcatcctgtgcacctttgccctgctccagcacgccgttcacccacggcaaccagaacggcagcagttcgcgctttttcgcggccttaagctcttttgaataaatcgctttcagtgtgcgctggtctgcggcgagcttaaccagcatctgctcatagacagttgcatgtcgcagcggggcggcttcccgctgcgcggtcatcgctgccgagacccgcatcatgtggcgctgtgcgggactcgtcatcggttacgctcccggctctgcggtcgccttagtcggtgtggagaaatcaccgaccttaattttttccaccaggcaaccggcggcgtagtcttccaccacgtaatcaatattcattgactcgtagttctccacgcggtcgagtttcgggttttcctcaatcacgcggcgatggctgtcatccatgtagtagatggacaggttttccagcttcgtgatgagcatcgcatccgccgggaagtacgggacgcgtaccgccggcaggttgccgatgcgtttctggctgatgatgacgtcagcggccagcatctcgctgttgtcctgctccttgttgacgatggggaaatacttgtccgccagtagctgacgccccacaatcaccacaaggtcagggtcttcctgataccacggctcaatcaggttgttggtcgcatccatcaccagtgcgtcaaggctggcataatcaccgcccttacccacgcggatgacctcagaggtcgtgtgaccttcctcgtcagtgaccttgctcatcacgcgcgccggggcttcattgcggtatttctgcagccagccgaccgccacatcctgcagcatcggattgctgctgcggtcagaggtttcggcacgcctcacgccgttaaaaccggccatgattaaatcaagggactggcgtttgataatggcgttacggacacggagctggaaatcctgataacgcgcccacaggtccagcgttttgtagcggatataaaaatcgaagttaatctggtcgcattcgtacttgtttgacgccagcttcgagaagtccttcggctgacgctcggtgccaccggcggtgtcggtggtgctggcgatggagccggtgacaccgatgccaattttttcccctttcatttcgctgaccggcacaatgttgatgcgggtcagaaagtcagaggactcctgcatggtgttcatcagggtctgggtgaccgacggttcaacggtgaattttttcgacacatcaccggcgtcgatgccgttcagttcggcaacacgggacaggtaggcattaaatttaaagcgggtttcctggcgcatagtttttcctgaaattaagggttaatcgtgaaggttttcccggactgactgacgccggttagcagttcgtcatcagggcgtcaccgccaccgccggtggctttactgcggcgctgctgggtcagactttcggtgtggtcgagactgtttttcaggcgggtgaatgcctgactggtttcatccgccctgtcagccacatcctgcttaagtgcggaaaaggcggtttccatctcagcgaggcgctgctcagtggcgctcagtttttcctgcacatgttcagcaacagcggtcaccgcttcatgcacgtcattcagacgggcgtcatcgctggcctgtttgcggccaaaaatggacttcaccttttcggtcagggcggtgaacacggtttcaggcaggtcttcaaattccagctcaacgggcgttgccactgaaatcaggttttcagggcttaatttgaagcggttcagggggttgtgttttgccgtgcggcagaattccaggtattccgtgccgaggcttgccgggtcatcggtgacggccagccccaccagataacacttgccggtgttggcaaagttcggctgaatttccattgaggtatagaccttctgcgcggccttgttcatcgcgataaggtcatcggtcggggtgattttcgcaaacaacgcccatttgcctttcagcgccgaatcgtcgtcaatcttttcggccttcagttcggccacatcgccataacgtttaaaaataccgtcaggcaggatgccgcgcagatgttccaggttaatgcggcaaccatagacacgcgggtcaaaggtttcggccatttcctgaatatcctgcgcactgatgacacgcccgtcacaggtgtcaccctcaacgccgatacgaaagaattttgagactttttttgccattgtcaggagtcctgaatagtgattagaggagtcacatgtcggcatcagtttcccgacgatgcgcatcctccgccatcagtcccggatggcttatcactgacacaacagcaccttagcgaatcgcgggacgcgactcagtagccttgccgtgtattcatcacggcgaggtattcatgaccatcaccacagacaccactcttttacacgacccgcgtcgtcaggcggcgctgctgtactggcaagggttttccgtgccgcagattgccgccatgttgcagatgaaacgcccgacggtgcagagctggaaacagcgcgacggctgggacagcgttgcccccatcagccgtgtcgaaatgagtctggaagcgcggctgacccagctcatcatcaaaccgcagaaaaccggcggtgacttcaaggaaattgaccttctgggacgccagattgaacgactggcacgggtcaaccgttacagtcagaccggcaacgaggcagaccttaatccgaacgtcgctaaccgcaacaaaggcgggcggcgcaaaccgaaaaagaattttttcagtgacgaggccatcgaaaagctggagcagattttctttgagcagtctttcgactaccagttgcactggtatcgcgccgggcttgagcaccgcatccgcgatatcctgaaatcccgccagattggcgcaacgttttatttttcccgcgaggcgctgctgcgcgccctgaaaaccggtcataaccagatttttctgtcagccagtaaaacgcaggcgtatgtgttccgcgaatacatcatcgcctttgcccgtctggttgacgttgacctgaccggtgacccgattgtcctgggcaataacggcgcaaaactgatttttctcggcaccaactccaacaccgcacaaagtcataacggcgacctgtacgtcgacgagattttctggatcccgaattttcaggtactgcgaaaggtggcatcaggtatggcctcacagagtcacctgcgctcgacctatttctccaccccgtccacgctggcgcacgacgcctatccgttctggtccggtgaactgtttaaccggggacgcgccagcgccgccgaacgcgtggaaatcgacgtcagtcataacgcacttgccggaggtcttctctgtgcggacggccagtggcggcagattgtcaccattgatgacgcgctgaaaggcggctgcacgctgttcgacattgagcagctcaaacgtgaaaacagcgccgacgattttaaaaacctgttcatgtgtgaatttgttgacgacaaggcgtcggtgttcccgttcgaggagctgcaacgctgcatggtcgacacgctggaagaatgggaagactatgcaccctttgccgccaatccgttcggctcccgcccggtatggattggttacgacccgtcacaccgtggcgacagtgccggatgcgtggtactggcaccgccggtggtggccggtggcaaattcagaatacttgagcgtcaccagtggaaaggcatggactttgccacccaggctgaatccatccacgaactcaccgaaaaatacaacgtcgaatacatcggtattgatgccaccggcctcggtgtcggcgtgttccagctcgtgcgctcgttctatcccgccgcgcgcgacatccgctacacgccggaaatgaaaaccgcaatggtgctcaaggcaaaagacgtcatccgccgtggctgtctggaatatgacgtcagcgccaccgacatcaccagctcgtttatggctatccgcaagaccatgaccagcagcggacgcagtgccacctatgaggccagccgcagcgaggaagccagccacgccgacctcgcctgggcgaccatgcatgccctgttaaatgagccactcaccgccggtatcagcaccccgctgacatccaccattctggagttttactgatgagcaagaaaaaagggaaaacaccgcaacctgcggcaaaaacaatgaccgccagcaccccgaaaatggaagcattcacctttggcgagccggtgccggtactcgaccgccgtgacattctggattacgttgagtgcatcagtaacggcagatggtatgagccaccggtcagctttaccgggctggcaaaaagcctgcgtgctgccgtgcatcacagctccccgatttacgtcaaacgtaatattctggcttcaacatttatcccgcatccgtggctttcccagcaggatttcagccgctttgtgctggattttctggtgttcggtaatgcgtttctggaaaagcgttacagcaccaccggtaaggtcatcagactggaaacctcaccggcaaaatatacccgccgtggtgtggaagaggatatttactggtgggtgccgtccttcaacgagccgacagccttcgcgcccggctccgtgtttcacctgctggagccggatattaatcaggagctgtacggcctgccggaatatctcagcgcccttaactctgcctggctgaatgagtcggccacgctgttccgccgcaagtattacgaaaatggcgcacatgccggatacatcatgtacgtcaccgatgccgtgcaggatcgcaacgatatcgaaatgctccgcgaaaacatggtgaagtcgaaaggccgcaataactttaaaaatctgtttctctatgccccacaggggaaagccgacggcattaaaattatcccgctcagtgaagtggcgacgaaggacgatttttttaatatcaaaaaagccagcgccgctgacctgctggacgcgcaccgcatcccctttcagttgatgggtggcaagccggagaacgtcgggtcactgggagatattgaaaaagtggcaaaggtctttgtccgcaatgagcttatcccgttacaggacaggattcgggaaataaacggctggctcggtcaggaggtcatccgctttaaaaactactcactggacactgacaacggctgaacatcgccgcctgcgggcggcttttttacaacccgccatcacgccctcacacgctcaccaccgcacaaaacagcccgcagacacaccaacgccccggctaacaatctaaacgccatcacgacgcgctcagacgctgaaaaaataaaatcagcaccaccgccagcgcgcagtgctttctccgcctcgcccgcccgcttcatggggcgcttttgatgcaattgcatgatagttctggtagcgtgcccctctgacaccgcagaatcataaaggtctattttgacgcatgcaaaaccatgcacctaatgtatgcatagcatctcttacatattatgagactaatttgcacagcctagctatcgatgggcagtgtacttcgagtggtttaatttccacatgttcaattgtttcccaaagaaatctgaactctttttgatctgaataaatatccttaggtttaacaaaacctattggtcctggaataggctcaagtcctgtaaactctcgtttatcataaatcactgcgcccattttcgcgcttttcagtcggataattttattgagcgcttctgtaacctcctcaaagaaaatacttggataggctatctctacacagtagttcccgaaggtactattcaatttggaaggattaaattcttttgtagtacataatacaaatgcatccttaattgagtaaaagcttttgccctgaccaatgcttacgttagagcacccttcaccaatcccgatcccaagacgtgaacacatttctacgaaaccagcatctgaactgccaccacttatgttatcaacactgtaagagtgcatggcttcacctctatcaccttgtagagggtcttcatatgctcggcacgtttcaagagtgctcaaccatacttttccgtcacataatgcctctgcgtgtattttttccttgaagaatctataaaccggtctaataggttcatctttagtgagtattttagaattcatttttatatttactttcggaaaagtttcttttcgttctttttttagacggctttttcgtcccatgctttcagtctcgtacttgcagaaaatttggtaacccgtaccgtaaaatacctgtaaacaagcaaatagcacaacatacaaaaggtttttaacttctagaaatataggccaacaatcaaacattaacgtataaatacgcacaccatttggttaaattcacgaccatccatcatcagtcggaaagttaaattttttactatcataaattatggttgttccacgcgccagtacgtcgagttcccatcgttcaggtgtaaccccagcctgcattaaatctaatcgaattttctttatacgatctctttcatatttactcattctggctgatggcgcttgctcgctggttttgagcggcgcattgcttctttgctgccgatgtttgcgcgttgcgccagcttttaacgccccgttaagcaccttcacgacgtccggctcattccagccaataaccccgcgctcaatcagctttaacaccgctgcggcttgctctgaaggtgtgggagccggtaacgaagtatcactgctggcaggctttccacagttattgacaggactccgaggcgcggcgatgccgctttttaaagtcaaaggctccacgaccggaactttcggcacaatgcgccagtccgtcgttctggtgatatgaatatgacgcgcgccgagatgcggcgcgtaaatgccgaccactctctcgacttcttcctcgtactcgttaacgtcatccgacgggctacgggcgactctgacagtctggcaatcgcgcggaacatttgccccaccctgcgcactgatatacaacgcaaaatcgccactgtctgcggcagcgcgtgcagcctcgacgcgttcgtcaaactcatcagcaatgctgacgccgcgaggcaatttgcgtagttcacggtaagcccccattgtcggcagaccaaccgttttaaattgcgggatgcgccacgttgacgcccatgcagtaacagccgcggcagtatctttcagaggtctgccggtatcgttatcgagctgaccatccagtgcatagccgtcgatgttttttgagatgtatttcgcgatataccccgcagcaccgccccgattaaggtgttttgcctgaaaacggtttcgcgcggctcctctttcgtcgccatcctctttgagcgcatagcgacgcatgatttcaataatctggttacgctggcgtggattacaaaaaagcatcatatgccagtgcggcgttccgtcgtggtgtggttcaacaacacgcaaaccgtagacctgtaaatcattatccttgaatgccgtgcgcatcaggctccagatacggcagagataacgctgcgcatcctttggattaaatgcctcatcgttccagccgtgattaagctgcacggttttactttcgccttttccgacctgacgtgtcgggtgatactttgacggcgcggtcagcgtgataaacatccccacatcaccctctgcagcggcgtaacgctcaataccggcaatggtgttcatcagctccatccggcgaatttcaggattagaaatactgcccatcaccttactgataaggtcgatgcgctcgccggtttccctgttttcaaggtcacacgatttaagaaattccagatttgcctggcggcgtgcacgcacatcacgaatggcatgtttactggcataaggagaacggtctttattgacttccccgacagctatcagtaacgcctcatgccagcgcatacgctggcctttaagctgatgagtccaccactcatcgttaaacaggcgggcaatggcagaatatgcctgcctcgtggtcatctgccctttacggtattttttccagtaaagcggggaaatattgaaagcacgtgcagcgccagcaacatgaccatacagatgcgcctgcgcctcatccgtaaacagcgattctttttcgccatgcgcatccacccaggcatcgcagagttcctcatacatcatgaaaagctgcgatgagatacgggcggcaaactttttcagctccttgtcattcatccccggcagacgcgcataatggtcacgctctgccagaaacagcaacgacgcgtcggtgttcatttcatggcgctgattcacacgctcaatgcgcggccataaacgacgctgaaaagtggatgtgaggaaataaaacccgtgtaccgggcttttattgcgccggatgtagtcatagcgtgaagtaaacagcgagcgcaaaaagtaaggcaggcggttaatcgtggataaaacaccttgcacctgacgcatctcgtcacgtgtaaggggtctttcgcgcccgacagcctcgcgtggcgcgttccatgcataagcaccggtaaacgccttaccggtgcctgcggcaaatgctgacggagggacaaaacgcccggaggctttaacggccatatgagccaaaagcctctgaacaacgcttgctgagttgctcaacctgcgcgtttaaatcagcaaaagactttgcgcttccggtcagaatatcgtgatgcatcaggccggaaacgagctggcttaatttcgggtaataaccaatcaccgacagccattcctgaccggcgtttttaccgctttccgctctctttttctcgtggagaataaactgaaagctgtcactggtaacgacataacgttcgccaatttcgatacgaatactcatgccattctccggtaatgcttgttttttgcttcaaagactgactggcaggaaacacaacgcgtggctgacggataagccgcacgacgggcagcaggtattggcgcgtcacactcttcgcaaaccagcgaagaaacaccgcaatgctttacccttgccgcgttaatctggcgctccagtaattcagcctgttgttcctgaataaaatctacgttgtccggcattaccagctccttttgtcgttaagttttttaaattcatcagcgcaatagctggcaatttctgtcgttaatttcgtcagttcatccacggaggagatttgcttgtgaaatacagcgcgtttaacaagtaaattgaccacatcagacaggagatttaattcgttctgataaatcgcgataacagactcagttatttcgcgtttttctttatcaagaccaagttgaataagagataaatcgccatttttcataacggcgatttttaaggcgttattcagtaatacaactgaacgagaacaggacatcaaagcacctccccgcgagacaatccgatattatgaaatttttccgactcctgactgagcagctcgactatctccacgcgggataactccgcctttgtgatgtggcgaatcatggcgtcaagatgagaagaaaagcgcgtcgcagcgtcggcctgtgcttcggttctggcctgttgcagcagtaatgcgtatttaccgcactgattttcagaaactgtatgcatgactttctccaggcaaaaagaagccccgcacgattaagtgcgttaaaaactctggttaattatttaatgcagatattgctctggttttaccgacgtcagaattgtcggtgcatactcaaacaggctgaataattcacgtaatgcacggaataaagcatcacgccagtaacatgattcttcattaattcgccagtatggctggttgaattctttttcagtcaatccggcatgcataaataaagtacgacgctgactgactgttaaaaaactaatatatgcatactcacttgcgccaacctgacggcgttttgagaatgccccacgcaattcatcaattgcacaaaccagccgttcacgttcgacgtcgttcatttcttcaaaacgcatcgttgcgtgacgctgttttaactgcgcatggaagcaaaccgttagccgttcgcgttccatcatctgattataataatcacatgtatcctgccagcgagggacggccagatgcttgccaattatccggcgcatagctgctggctgtttttcaacgagattgagcgtcatcactgtcatttccagaccctccggcttttcagaaaggtcagagccttttttaacggactctgttttttggtgcggataatgattcccttacgccccttaccatgggtgatggtgaagtcaatcgccctggggctttcgttacgcaataactgagcaatacaacgaggctcattcatacggttctccttaacgtggttcaccgagacctaaccacatcaaccagccgtcacgaatctctttaggacggctttcataagccagttttagtccgttattccatgccggaaggtatacccaatattcaccagcacgccccgatactgactgagggtcagtaatctcaataactggtaatttccctttctcaatcatgccccttacagctcttggagttttaccaatgagttttgcaaactcctgataaggcacggcatcagtcacgcttacaagctgtctattcatctgctacgattctcccttagtgcttctaatggctcctaatggctaattattgcctaaaaggataactccagaagcacaacatttcacaccatcagcaagaaattacgcaatcggagtaattatgtcaatagacgtttcggagaagttgaagctaatccgtgaatctgaaaggttaaaccgtaaagaattcagtgaattaactggtgtagcctacagctcactttcgagctatgagagccggtcaaaaaacgctggagttgaagccataatgaaggtcttacaacatcctagatttactaaatatactttgtggttcatgactgatcaggtagctccagaagccgggcaaattgcgcccgctctcgcacactttgggcaaaacgaaacaacgtcgccccactccggtcaaaagactggttaacaatttatcgtgaatatattcatcacaagtgcctactattggtggctaaatttcagccaccacgaaaaaagcgattagtagtagcaaaaaaaagtaccactcggagggttttctgatggcaatcaaaaaactcgatgatggtcgatatgaagtggacatccgccctactggacgtaatggaaaacgcatccgtaggaagtttgataagaaaagcgaagctgtcgctttcgaaaaatacacgttgtacaaccaccacaataaagaatggctatcaaaaccaacagacaaacgacgtctgtcggaactgacacagatctggtgggatttaaagggtaaacacgaagagcatgggaaatctaatcttggaaaaattgaaatcttcacaaaaataacgaatgacccatgcgcatttcaaatcacgaaatcccttatcagccagtactgcgccacccgaagaagtcagggtattaaaccttcgagtatcaatcgtgatttaacatgtattagcggcatgtttacagccctgattgaagcggagttattctttggtgagcaccctatcagagggacaaagaggcttaaggaggaaaaaccagaaacaggctatctcacacaggaagaaattgccttactgcttgcagcacttgacggcgacaataaaaagattgcgattctttgcctgagtacaggagcacgttggggagaagcagctcgtttgaaagcagaaaatatcatccataaccgcgtcacgtttgttaaaacgaaaacaaacaaaccacgcaccgtcccgatctcagaggctgttgccaaaatgatcgcggataacaaacgaggttttttattccctgatgctgattaccctcgcttcagacgaacaatgaaagcaataaaaccggatttgccaacggggcaagccacacatgcactaaggcacagctttgccactcatttcatgattaatggaggaagtattatcacgctacaacggatactaggtcacacgcggattgagcaaactatggtttacgctcattttgcgccagagtaccttcaggacgccatttctcttaatccgctaagaggtggtactgaggccgagagtgtccacacagtgtccacagtagagtaacgtttaagggctttcagtggtaatttatgccgctcaaacccgcatagtaccgttgaaagcccctactggtgacaccctaaatctcccttacacgggcttattttttatgcataagccctatccctggtcaccgtcttccattgaccacatcgatagaatctcccttcatagcacgatgcctttcacgtaacggcatcgtgctcgcacaggttccggctaagcacaaccagaacgcgcatatttgacgcttaccaaaaaatattctcactctccacatttgaatgtcagacgagcgacgccatgtaatcctgcaccttctgtcttcaggtcaactatctgcatttttttgccctgagtaacacagaaatgggctgcatcattttttactatattttctgcaccagatattctacccctggctaaagaagcttcggcttcggtgtagtattggttatcgagtttacgctgaatattacttttatatgcaaggccaaatttaccgatacttgtctcatcattatgcacagcacaaccagacataagaaaaacactaattaatgatatagcagctattttattcacctcaccttcccccattaaataccaacgacactctctagtgtttaagtataataatggccgatcattataattgaataggattataataaatgttttgtacaacatttcctacataagtaggaattacagactcagaggcccttccgggtaaccctatgggagctttaatatatttggaatagtatattgaagatgccactgtttagttgaatattagatatttgctcttttttcaaatttaccggtggctaccgttaacattcactgcccccattgcaagctcctggtggtaacaactgaattacccatgcttgaactgactttttatcctccgactttcatcctgttctgactccaccttttgttttctgctctacactatctacagaccaatcataaaggcacatacgatcatggcagaatttcccgccagcttactgattcttaatggcaaaagtactgacaatctacccttgcgcgaagcaattatgctgttgcgtgaggaaggaatgacgatccatgtgcgggtcacctgggagaaaggtgatgccgcacgatttgtagaggaggcccggaagttgggcgtcgcaacggtgattgctggaggtggcgatggcaccattaatgaagtttctacggcgttgattcagtgtgagggggatgacatacccgcgctgggaattttaccattaggaaccgccaatgattttgccaccagcgtagggattcctgaggcactggataaggcgctgaaactggcaattgccggtgacgccattgcgatagatatggcgcaggtcaacaaacaaacctgttttattaatatggcgacaggcggatttgggacgcgtattaccacagaaacgccggaaaaattaaaagccgcgctgggtagcgtctcttacatcattcatggcttaatgcgtatggatactctgcaaccggaccgttgtgaaatccgcggtgaaaactttcactggcaaggtgacgccctggtcattggtattggtaacgggcgtcaggccggtggcggtcagcaattgtgtccgaacgcgttaattaacgatggcttgctgcaactgcgcatttttaccggcgatgaaatacttccggctctcgtatcaaccttaaaatctgacgaagataacccgaatattatcgaaggcgcttcgtcgtggtttgatattcaggcaccacacgacatcacctttaatcttgatggcgaaccgttgagtgggcaaaattttcatattgaaatacttccggcagcgttgcgttgccgtctgccaccagattgcccgcttttacgttaaataaaagcaagcgcagaagcaggattagcagaccggcatcatccctgggatcttctgcgctcacccttttttgttacgcagctacggctaacgctgccagtaattcattcatcgataaatatcttgcactcgccgcattaaagcaggtttgttgggcatcttctgataccacaatggtgtttattcctgccgcctgtgctgcctgaaaaccactcacgctgtcctctataaccaaacaatctgcagcagacagttgcaattctcgcagtgcagaaagataaactgccggatggggtttcccatgcttttcgtcatcagcactacaaatcaccgaaaaataatgctgaatattgagttttgtcagtacagcatcgatcacctggtaagatgaagaggttgccagcgccagttgatagccactccggcgcaaaaaaaataacacgtcctgaacgcctggcatcgcttcgcccgtcccggcaatcaacgtagtgatcaggcggcgaatctcactttccaacagtgcgggttcaatgtgtaaatgacaatattcacaccaggtttgggcaatctcatccagccttttacctttagtcagtcttatacactcttcgtcactgacacatgcgccccaccttgccagtgctcccttttgtgcctcacgccataacccttccgaatcaatgatgacgccgtccatatcaaaaatgactgctttacaattaaacattgttcctcgcaataaagcctggcaccacaccaggcttgtcgtcatcaggaaatggtggcggtcttcccttcacacacttgctgatttgagaatcccggttgttcgacgcgaataaacgggcaaataataaacgctatcacatacagggtggtgtaagcgataaccacaccaatagtactgaaataaggcagaagtaccacggcgattgccggagcaaggaagttggacaacccggctgaaaggttataaaccgaaatagctgctcctttatgtttcggttccagtgccgggaaaacggctgccatcggtacgaatgcagcaacaaagatccccagtgccaccgcaggtatcagcgccatagcaaagttatgaccgaaatgttgcggtatgtagtagaacgccaggcttgaaagcgccattcccacgcaaccaaaccagcgaacaactttcatccagcccattttctctgccagcacgccccagaatacgttagagaagatggtggtaaagaagaagactgcccagacctgcaaccactcagaggtggtaaagcccagctcatcaacaaacatcatcggcataattacggcgaatccgaataaagataaggtgttgataatgcgaacaatactggaaagcaaaatattgcggttggtataaagcaaagtcaccgcacggcccagttcgctaaacttctcttttgtggttaggttttgcatatggcgtggtgtttctactttgcgcatagaaattaacgcaacagcgccaccaaccccacagaaggccagcgccagccataatgttcccatttcgccaataagcggaatggtaaaactggggatgtagctgccgaatacgccgataccaatagagtaaactgcccagaaccagcccagagcagcactggtgctgtcactgcgtacgttatggacaatcgccacaataaaggcgtagaggaacagcggataggctaggccacgaataccataaaacagcaggattaacccatagttcgcctgccccagaccaaagaccagaaacagcacgtgaaatacgcaccacagcacaaagccgataaacatggttttttgtggcgtaataatttcggcaactacgccggaaacccaggcggaaagcgctgccgccaggccatagagcgtaaaggcaaaggaggcttctgcaggcgtgaaacccagtgctttaatgtaatgcgacaggaatgccagttcaaaaccgtctccggtcataaagatggcaatggcaatatatccccacaccagatttaagggtaatcccagccattgtttatttgttaacgacatagtgacctcgtttgtaggatacaaaacgccgctccggtgcaaacaccggagggcatttgtgacagatgttattgattgcgatagttcaggtcgttgtgatacagcgcagtaaactgctgatatcgttgcatcagcgcattatgacgttcaggatcgctgcgccaggttttgaagatttcaggtttttcacacactgccgccagtggttttcccgcagcaagacaggccagacgcgcggctcccagcgccccacccgtttcaccgcctttatgcgtcaccactggcatatcgagaatatcggccagtaactgcgcccagaatggacttctcgcccccccacctaccagcgagcattgctcaattgccgtaccgctttcttgcaggactcgcagcccatcggcaataccaaagctgacgccttccagcactgcatatcccattagcgcacgctgactggagtgtgtcagcccccagaacaatccccgggcatgaggatcgttatgtggcgtacgttcaccagaaagatacgggaggaacatcggtgcactggctttgtctgcatcagaaagttgggcaatctcttccagtaactctgtttccgttacccccaccagacggcagaaccattgcagacaactggcggcactgagcattacactcatctggtgccataaattcggtagtacgtgacagaaagcatggactgctgattgcggcgcaggacgataggcatctgtcactacaaacaacaccccggaagttcccaaagaaataaacgcatctccgggagaaacggcccccacaccaattgcgctcacggcgttatcgccaccgccaccagcaactacaaccgaagatgtcagcccccaacggctggcaacttcaggggaaagagtggcagaaacgtcacaaccttccaccagttccggcatattcgcccgtgtcaggccacatttttccagcaacgaatctgaccagtcgcgtttttccacgtcgagccacaacgtgccagcagaatccgacatatcggaaatcttttggccggtcattttgaaacgcaaatagtctttcggcagtaaaacggtggaaatgcgcgcaaagtgctgcggctcatggcgccgtacccatagcaatttgggggcggtaaatccaggcatcgccaggtttcccgctacctgatgcaactctggtgcgatctcttccagctccgcacactcctgcgcactgcgggtgtcgttccataaaatcgccggacgaatcgcctctcctttttcatccaacaggacggcaccatgcatttgaccagaaaggccaatggctttgatcgcctgccagtggtgaccgcatttttcccgcagggtcgacattaaatattccgtcgcttcccaccaggcttgcggcgattgttctgaccagtgtggatggggccgctgaatggtcagcggcgcactatgggtggcaacaatttcattgttttcatcaatgaccagcgccttaacttccgatgtgcccagatcgatacccagatacataaccgcctcctggttagttaattaacgcgtagacgtcagcgattttttcgcgcaacaacgcggcaaaatcttcacgttcggttaaatcgccaaacagcgctttatcactggcataaacagcgacgggatcggcagactggaacattgcatggacagctggtgcatcaaggatgccatcctgatattcatagggcagtttgccgtgatgccactgctccatgaatacgtaaaacagtgcaggtaacatggcggtggcattcgggcgaacgcctcgctggtagcactctcgcagtgtgggggcaatcatcgccggaattttcgagaaaccatccgcagcgacgcgttggttggtgtcctgaatatgtggattggtaaaacgcttgagtacaacatcacggtaggttggcaaatcgataccgttatcgcccaagcaaggaatgacatcttccgtcacgtagcggtcggcaatctgatagataaaatcggtcattgtgctttcgtggatatatttttgaccgattaacgtacctgcccaggcgatgcaactgtgtgaagagttaagaatgcgaatcttcgcctcttcataggggattaccgacgccaccagttcgacaccgaccttctccagtgccggacggacatcacggaaattatcttccacgacccactggataaaggtttcgcccattaccggcgctttatcggcaatacccgtttgagccttgatccgtgccggaagttctgctgccggacgaggcgtaatgcggtcaaccatggtattcgggcaagtggtatttgtactcagccagtcgatgacatcctgtttgccagttagctggagaaactcaaccaggccatcatggaaacgttcaccattatggcgcacgttatcgcaattcagcagggttagtggtccggcgttatttgccatacgcgcttcgaggatacgggtaataacaccgtaaattgttttgcatccccctttaagatctgccgctaaatcaggattgttaacttccagtttgtgactggtattcaggtagtacccgccttcggtgacggtgaaagcaatcacttttgtcttcggatctgccccttcagcaatcagcggttgtaaatctgcctgccacggtatcaacttctgaattgaggtgatctcttcatattcgcttaccccttccgggctgacggtttccagcacatagcgacctttctgtgcactgagtgcctgtacgacatgttcagcatcattacgaatattgcccgcagcaatgctccagcgtttatcgcccatcacctgcaaacggtgtagataccacgcctgatgtgcgcgatgaaaagaacctaacccgatgtgcagccatgtaaattgttcgttcattgtttcgttctccattgacgttatggctgaactgtaatcgaacatttgagttaattaagagcgttagatcacaaaagaacaattgaccaaaaaaattacaaatgaccaaatcaaagcaataaacttgcctcgcggtaaagctatggccaaaatgacgctaatcagttgcgggattttcacgattccgcacgccacttttgaggtagggaaacgtgaacaaagaagatgacatcaggctcgatcaaaaagtacgggcggcatggatgtactacattgccggacttaatcagagtgaaatcgcaagtcagttaggtacttcacggccagtggttcaacgcctgatagcagcagcgaaagacgaagggattgtgtcgattggattgcatcatccggttgccaactgtctcgattatgcccaactgttaaaggaaaagtaccaattaaccgactgcaatattatgccggtttacagtattgaaagtacgctcgacagcgtgacatttggctgttatcaactgatggcgcgttacttacagggtgacaaaccgaccatcgttggtattggttctggcttaacgttgaagaaaaccattaaacgtatcgattttgatagtcagaatacccgctgtgtggcgctgattagcgccatgaatgaacacgggcaatgtaactattacgacgacgtaccgctgcttttggcgagaaaaattcagggaaaatattaccagtggccagctccacgctatgctcagtcccgcgaagagtaccaaatgtggtcaaccaatcgattgttccgcaacgtctctaccgtagcgcgtgactctgatgttattttcgtgggtattggtgctttaggtcgtcaaagccctattttcaaagatggctttattgatgagcagcaactggaagagttaacagcacgcggaggcgttggtgaaatcctcggacgctttattgatgctgaaggcaatgttgtggaaagccagatcaaccagatgatcaccagccatgatatccgcgaaagcaactgcccacgtatcgcagctgcctgtggtgaggataaacgtccggcgatcctcgcagcattaaaaggtgggtggatcaacggtctggtcaccgatgaacacaccgcacgctggttgctgacacgttaatctcagctgacaacattcaggctcggaatgagttgtggcggtatctcaatgcgacgcagggtggtatcgccagaatccacaatttcaaacactttttcgagcatggcgggtacatcctgacgaaccatatcgatatcgtgcccgagcagagaaacaaaaggatcccagtcaaaacaccccattggcggttgattggctcccgtctgcccggtttgcgccagccagcgaaccaccccttcaagagagattgtcgagttgacgaataacccgtgaagcgatactgcagagctttggaagacctctttcagtaatccctctacgcgagcagaagagtagccggtaaccagtttatgttcatccggtacggttatccccaaagcctgatgggcatcgacaaaaccacgtaaacgttcagcagtattgttatcgcttatacgtccaccgacaaaagtcaaaggtgccagcttgccatagcgtttctggctgttggctaaaattctttccgtcaataatttcgcccccatatagttatcagaaatgatcgacggcgccagtgttcccggcagatccagattcagtgtcggtacgcccgcttgctggcacatttgggctattttatccggttgagtcgctccggtagcaatgacccaatccacctgccaggagagcatggcgcgagcagcctcaatttccagttctggctgtcgccgcgtacaggtgatgattggcagtaatcctctggcacgcgccatctcttcaaatttttcggcaatcgatccaaagtatcggttgtcatatttcggcacaatcatgccaataacgttggattttttactgcgcagtaaacttgcctgccgattaatggcatatccctgctcttccgcaatacgggtgaccttctcagccagctttgcgctgatgcgtcgctttttccagttgccattcaaaatagcgcttaccgcactggcagaaacgccggttaattctgccaggtcgtaaatggtcgttttcttcgttttctcaacgcgtgtcacaaatttgcctcttcattttgaatgtctcttgctgagaatttaagcaagtgctagatctgcttcatcgattgagcagtttgcttcacacggcagctaaattcccgttcagtgcgtgcaagcaaacagagactataaattcgccctggtaaaaggattatatgatgaatcactctgtgccctctatgaatactccccttaatggcaaagttgcagctatcactggcgctgcgtcaggtattggcctgcaatgtgcaaaaacgctgctcgatgcaggagcaaaggtagtattgattgaccgggaaggcgacaaactgcacaagattgtcgctgagttaggcgaaaacgcgtacgcgctgcaactcgatctcttcaataatcagcaagtcgataacatgctggcggacattatcgaactggcgggtgggctggatatttttcatgccaatgcaggcgcttatattggcggcccagtggctgaaggtgatccagatgtctgggatcgtgtgttaaatctgaatataaatgcggcgtttcgctgtgtccgtgcagtcctgccgcatatgattgcgcagaggtcgggcgatataatttttaccagttccatcgcgggcgtcgttccggttatctgggaaccgatctacaccgcgtccaaatttgccgttcaggcattcgtacacactacccgccgccaggtttctcaatatggcgtgcgtgtgggtgcggtgctgccaggaccagtagtcactgccctgcttgatgactggccaaaagccaaaatggaagaagccctggcaaatggtagcctgatgcaaccgattgaagtggcggaatcagtattgtttatggtgacccgctcgaaaaatgtcaccgtgcgagatttagtgatcctgcctggcagtgtcgatctgtaagggcgcaatcatgacaataaccaaaaccgttattggtgttgatgtgggatcaggcagtgtccgcgccgggatttttgatctcaacggatctctgctatcccatgccacagaaaaaatcacgactacgcggcgcagcggaagccgcgtggaacagtccagccaggagatctggcaggcggtctgttcatgtattcgtaatgcgctcactctggcagacgtttgtgcacaaagtgtggcaggcatcggttttgatgccacctgttctctggtggtactggataaaaacggtgatccattgcctgtcagcccggaaggagatgcaaagcaaaatatcattgtgtggatggatcaccgcgccaccgaacaagcagagcgaatcaatgccactcaccatccggtgctgaactacgtcggtggtaaaatttcgcctgaaatggaaacaccgaaaattctctggctgaaagaaaatatgccagagatctacgaacgtgccggacaatttttcgatctggccgattttctgacctggcgggctaccggtgatttagcgcgttcagtatgcactgttacctgtaaatggacgtggctggcacatgaaaatcgctgggatccagattatttccgcaccattggccttgcagagttagcggatgaagattttattcgcattggtcatcatattgtttctcccggaacaccttgtggaaatggtttaacagcacaagccgcggcagagatgggattactccccggcacacctgtcgctgtagggttaattgatgctcacgctggtggcatcggtacggttggcgtagaaggtggagcgctgaacaatctcgcgtatgttttcggcacttcttcatgcaccatggcatctaccacttctccctcgtttgtaccgggtgtctgggggccgtattacagtgcgatggttccaggtctgtggttagttgaaggcgggcaaagtgctgcgggagcagctattgaccagctacttgatttccatccggctgttgaagaagctcgcgaaatggcacaacgtgtgaatcagcccctccccgtctggcttgctgatcgaatcctcgaaaaaacggcgcaaccatcagatgctgtcgccctggcgaaagggctacacgtggtgccggaatttctcggaaatcgcgcccccttcgcagatcctcatgccagagcggtaatttgtggcctaggtatggagcgagatctggataatttactcgccttgtatatcgctggattatgcggaattggttatggtctgcgccaaattctcgacgctcaaacagcgcagggagtagtgagtaaaaatatcgttattagcggcggtgccgggcagcatccactggtacgacaaattctggcagatacctgcggtattccggtcattaccacgcaatgctgcgaaccggttttattaggctcggccattcttggtgctgtcgccggaaatattgcaccttctgttggcgaagcgatgcaacaattcacccatgtggataaatattattatccgcaagaacgctatcaatctcttcatcatcgtcgatatgaggcctataagcagttgcagcatactgcaaaattactcagagactaattaaccagccgcctgacgctgttttcaggcaatcactaataacgactcactccggtaatatcccggagtgcattcatctgcaccctaaaaacgaggtttatatgtccagaaataataaacagtggttgggtttgccactgcatctgatatggggatatatcgccatcgcagtatttatgactggtgatggtttcgaactcgcattcttatcgcactatattaaatcgttaggcttcacacctgcggaagcctcttttgcctttacgctctacggcctggcggctgccctttccgcctgggtttctggggtagtagcggaaatcatcacgccgcaaaaaaccatgctgattggttttgtcctatggtgcgtattccatgttctgtttctggtctttggattaggacaggcaaactatgggttaatcctgctgttttacgggattcgtggtttagcgtatccgctatttctctactcatttatcgtcgttattattcataacgtgcgtagcgaaaattccagttctgctctgggttggtactgggcggtatattcagtagggatcggtgttgctggcagttatattcccagttttacgataccgattatgggtgaaatggaaaccttatggctggcactggcgttctgctttgctggcggtgtcattgccatgatctccttgcgtcatgttaaaacgcctggacatatgcataatttaactccccgtgagaagtttgcagaattaagtcgggcagtaactttactttataccaaccgcaatatttttctctccagtattgtgcgcattataaataccttatcgttattcggttttgcggtcattatgccaatgatgtttgtggatgaactgggattcaccacctctgaatggttgcaggtctgggcggcatttttctttaccactattttctctaatattttttgggggattgtggcagaaaaaatgggctggatgcgtgttattcgctggtttggttgcctcgggatggcagcatcaagtttagcgttttactacatgccgcaatactttggtcacaactactggatggcaatgattccggcgattgctctgggaacttttgttgctgcatttgtgccgatggccgctgtcttcccggcactggaaccaaaacacaaaggtgctgcaatctcggtttacaacctctctgcgggtatgtctaacttcctggctccggcaattgccgtggtgttattaccgtggtttagcactatcggtgtggtcattgcctatacagcattgtatctattggcctttgtcctttgcgcattcattcgcgttgagcagccaggattcagttctgcgccagtgactgagaaggcattgaatatctcctgaaaaacgaaacgcatcaggcactcatcctctccctcatgggagaggatgatttcacatcaggcaatagtaattttgctatcgagataaacgtcctgcacggcattaatcagtttcacgccgtcagccatcgatttcttgaacgccttacgtccaagaatcagccccattccgcctgcgcgtttgttgataaccgcagtacgcactgcatcgctgaggtcagtttcaccgcctgcagcaccgccggagtttatcaacccagcccggcccatatagcagttagctaactgataacgcaccagatcaatcgggttttcgctggttaacttgctgtacacgcgatcgtcggtataaccgtaattaatcgctttatagccgccgttattttccgccattttttgtttgacgatatctgcgccaatggtcgccgccagatggtttgcctgaccggtcaggtcggcggaaacatggtaatcaacgccatctttcttaaaggcggagttacgcaaataggcccacagcacggtcaccatgcccagctcgtgcgcacgttcaaaagccgcagaaatttcttcaatctggcgacgtgactcttccgaaccaaaatagatagtcgcaccaaccgccaccgcgcccatgttgaaggcctgctccacgctggcatacagcgtttgatcgtaggtgttcgggtaacttagcgtctcgttgtgattaagtttgacgaggaatggaatgcgatgcgcgtaacgccgcgataccgacgccagcacgccgtaagttgacgccacacagttacagcccgcttcgatagccagttcaacaatgtttttcgggtcaaaatagagcgggttagcggcaaatgaagctccggcagagtgctcaacgccctggtcaaccggcagaatagaaagatatcctgtgccagccagacgcccggtgttgtacaacgtctgcatattacgtaacaccgctggcgggcgattattgtcaatcatcacgcggtctacgtagtcatgtccggggagataaagctggtcagaaggaatagttatacaacggtgctgtaaaaggttgtcggcgtctttgccaagcaactgcgcaatatctgtcattactatgctcccgtaaattccgattggttatcggctatggattgtcctggcccgccttttgcgggcaatcataatcctggtcgttacgggcgagtttttccatcttttggatgttttttcagcgttttctgttgcctcgattcatcagaaaaaatgttatcgcggtcaagctttcaccgcaaaggtatttaaaaggtattattaagtggtattgtcatcgcgtaccttacattacctgtcatgaaggaattaaaagatgaaaacaacagcaaagctgtcgttcatgatgtttgttgaatggtttatctggggcgcgtggtttgtgccattgtggttgtggttaagtaaaagcggttttagtgccggagaaattggctggtcgtatgcctgtaccgccattgcggcgatcctgtcgccaattctggttggctccatcactgaccgctttttctcggcgcaaaaagtgctggcggtattgatgttcgcaggcgcgctgctgatgtatttcgctgcgcaacagaccacttttgccgggttctttccgttactgctggcttactctctaacctatatgccgaccattgcgctgactaacagcatcgcttttgccaacgtgctggatgtggagcgtgatttcccgcgcattcgtgtgatgggcactatcggctggattgcctccggtctggcatgtggtttcttgccgcaaatactggggtatgccgatatctcaccgactaacatcccgctgctgattaccgccggaagttctgctctgctcggtgtgtttgcgtttttcctgcccgacacgccaccaaaaagcaccggcaaaatggatattaaagtcatgctcggcctggatgcgctgatcctgctgcgcgataaaaacttcctcgtctttttcttctgttcattcctgtttgcgatgccactggcgttctattacatctttgccaacggttatctgaccgaagtcggcatgaaaaatgccaccggctggatgacgctcggccagttctctgaaatattctttatgctggcattaccgtttttcactaaacgctttggtatcaaaaaggtattattgcttggtctggtcaccgctgcgatccgctatggcttctttatttacggtagtgcggatgaatatttcacctacgcgttactgttcctcggtattttgcttcacggcgtaagttacgatttttactacgttaccgcttacatctatgtcgataaaaaagcccccgtgcatatgcgtaccgccgcgcaggggctgatcacgctctgctgccagggcttcggcagtttgctcggctatcgtcttggcggtgtgatgatggaaaagatgttcgcttatcaggaaccggtaaacggactgactttcaactggtccgggatgtggacttttggcgcggtgatgattgccattatcgccgtgctgttcatgatttttttccgcgaatccgacaacgaaattacggctatcaaggtcgatgatcgcgatattgcgttgacacaaggggaagttaaatgaaaacagaacgtattctcggtgctctttatgggcaggcgttaggggatgcgatggggatgccctccgagctttggccacgcagccgcgttaaagcacactttggctggattgaccgttttctgcctggaccaaaggagaataacgcggcctgttattttaaccgcgccgaattcaccgacgatacctcgatggcgctgtgtctggcggatgcgttgctggaacgtaaaggcaagatcgatccggatctgattgggcgtaatatcctcgactgggcgctgcgtttcgacgccttcaacaaaaacgtgctaggtccgacctcgaagattgcgcttaacgccattcgcgacggtaaacccgttgctgaactggaaaacaacggcgtaaccaacggcgcagcgatgcgcgtctcgccattaggttgtttgcttccggcgcgcgatgttgattcctttattgatgatgtggcgctggcgtcgagcccgacccataaatccgatctggcagttgcaggtgcggtagtcatcgcatgggcgatttctcgtgctattgacggagaaagctggtcagcgattgttgattcactgccttcaattgcgcgacatgcccagcaaaaacgcaccaccacgttcagcgcctcactggcggcgcggctggagattgcgctgaaaattgtgcgcaatgccgacggcaccgaatccgccagcgaacagctttaccaggtcgttggcgcaggtaccagcactattgagtccgttccgtgcgccattgcgctggttgaactggcacaaaccgacccgaaccgttgcgccgtcctctgcgctaaccttggcggcgatacagacaccatcggtgctatggcgacggcaatctgcggcgcgttgcatggcattaacgctatcgatcctgcgttaaaggcggagctggatgcggtaaatcagcttgatttcaaccgctatgccacagcgctggcgaaatatcgtcaacaacgggaggcggtatgagcggcgctcgattacacacgctgctgcctgaattaaccacgcgtcagtcggtgatggtcgtcggcgcggcggtcattgacgtgatcgccgacgcttatgccctcccctggcgtgggtgcgatatcgaactgaaacagcagagcgttaacgttggcggctgcgcactgaatattgccgtggcgttaaagcgcctcggcatcgaagcgggtaatgccttgccgctcggtcagggggtatgggcggagattattcgcaaccggatggcgaaagaggggttaatcagcctgatcgataacgccgaaggcgataacggctggtgtctggcgctggttgagccggatggcgaacgtacttttatgtcattcagcggtgtggaaaatcagtggaatcgccagtggctggcgcgattaaccgttgcgcctggcagcctgctctatttttccggttatcaactggcctcgccctgcggcgaattgttagtggaatggctggaagagctgcaagacgtgacgccgtttatcgattttggcccacgtattggcgatatcccggatgcattactggcgcggatcatggcctgtcgacctttagtgtcgctcaatcgtcaagaggctgagattgccgccgaacgttttgctttatccgcagagataacaacacttggcgagcaatggcaggagaaatttgccgcgccgttgatcgttcgtctcgataaagaaggcgcatggtatttcagcaacgacgcttctggctgcattccggcatttccaacgcaagttgtagacaccattggggcgggcgacagtcatgcaggtggcgtacttgccgggctggcctctggtctgccactggcggatgccgtattactgggcaatgcagtggcgtcgtgggttgtcgggcatcggggcggtgattgtgcgccaacgcgcgaggaactactcctcgcacacaaaaacgtatagatcgctgcgacagtggctaatgctgtactcaataggccgttgctgttggtcaagcgccacttgcttgatcaccagcaccggtattttgctatctaactgaatatgtgactgaaactcggcatccggcatccgggcgctaacgcgggaacgcgtacgttgtgggtaaatgtgctggctgcggaaatagtcataaagtgaaatcccgatggcatcaacatcatgaattaaatgcgccggaacccacgattcctcaatcgataccgcttcttcatcgacatagcgaatacgcttaagcaaaaagacatcacttcctgcttcgaccgccagctgctgcgcgacttcttcgggacatttcacgacacgcttgttaacccatagcgtatcgggctttttcccgcgcaataccacctgctgagaaaaacctcgcgcttctttcaacgagtattcgaagatgttgttgatctgcgtgccgtaaccgcgcgaacgcgtcaccacaccctcttcttccagcgcctgcatcgccttgcgcaccgtaatgcgcgaaacgccggttaactgacttaaatcacgctcaccgggcaaaatattgccatgctccagcaccccgctgcgcacggcattttttaccgtttcggcaaacttaatataaagcggcgtgttatccgccgctaaaatacgctcgttcagttgggcaatcagctgggtatgcgcttgttccatttgtctttttcctgccggggagtctggtgggagtatatcactgcttcttatttaaggcgtttctttaatcccatcaacgaatgcctgcaactcctccaccgtgcatttaaatacattaaaatccaccggaccattgatgccatctacctgtccacggtcggaatgctgccagaagcgccaggccatgccgtcattgtccggacgacgttgataatagtgagccacccaccacggatattcattgaaatagcccgccagattcgtgtgataaaaaacggctcctgagtaaataatcggcttttttcccgtacttttttcgaccatttttagccactgacttactcgtttgcgtaattcttttgccgataattttccccgttcttctacgtccagtaccgcagggaaatcgccttgtgagaaatccaccgtttgcagaaataatcgtgcctgaaccggcgctgctaccgacggggagaaataatgatacgccccgcgcagcaggccattttcgcggcttagttgccagttacgcgaaaaatacgggtccaccagcttttcgccttccgtcgccttaataaaagcaaactgtaagcggataccgttgtcgcgcatttttgccacccgctgccagtcgatccgctcctgccagcgagaaacatctattccgtgaatggtgtaactggcaggaatgcgaatagcgaaagatttaaccgggcgataaccgtagaaatggatgtagtctgtaatctgaactgctgtcgaatagaaaaaattcaccgtctgacgcggataaattgcaacgatggaaattagcccaagagcgcataatagagaggtgagtttttttcgactggtaattcttagctgcattggtttcatccctgaatgtcagtgccaaaggctgacaataaccaaagcagctatagtacggtgctcaccaccaggcgtggaagtggtgaaccggaccaataccgtgaccaacttccagcgtgtcggcctgggctaatgctgatgaaagccagctttttgcctcctgtacggtgtcagcccagtttgtatggcgcgggcgtagtgcagccaacgccgcagagagcgtacaaccagtgccgtgggtgtttttggtcataatgcgcggtgcggtaaaccgttgttcaccctcgcgggtaaacagccagtccgggctttgctcatcatccagatgaccacctttcattagcactgcgccacagcccatcgccaacagcgatcgcccttgttccagcatttcctgttcggtgcgcgcgtgtggcgcgtcgagcaaggcggcagcttcgggcaagtttggcgttattaatgaaacctgtggcaataatcgactgcgcagcgtagcaaccgccgaaggtgaaagcagcgggtcgccgctttttgccagcataacggtgtcgagtaccacgttttggatctgataacgttgcaaccgttctgccaccgcttcaacaatatcggtttccgccaacataccgattttagtggtgtcgattcgcacatcgctgaacaccgaatcgagctgggcggcgacaaaatcaggctcaatgcgatacaccgactgtacgccacgggtattttgcgccaccagtgcagtaataactgagcaaccataagcgccaagtgccgagaaggttttaagatcggcctgaatccccgcaccaccactcggatcagtaccggcaatcgtcagagcgttaattcgtttcatgcctgcacctcctgcgtcaattgccagagcgcatcaaggaaatgtggaacaaaactgcctggcccctcgcttctggcgactgcgcgctctccggcttgtttcatccagtgacaggcagatgcgacattttccagcgtatcgcctggtaacgcacagcaggcagcgacaaccgccgataatgcacagccagttcctaccactttggtcattaacggatcgccaccgtgaatgccaacggcgcgatggccatcggtaacataatccacctcgccagtgaccacgacgattgcgccagtttcccgtgccagtgtttgtgcagcgggtatcgcgttagctgcggcgtcagtggtatccactccccgtccaccattagcaatgccagctaatgccatgatttccgaagcattaccacgtatcgctgccggtttaaaagataaaagttcatgacaaaaatggcggcgataatcgagcgcaccaaccgctactggatcaagcgtccagggtgtttgagagctttttgcttgctcaacggcagcacgcatcgcctgagcgcgtggctgcgtcagtgtgccaacgttaatcaacaaggcactggcgatagccgcaaactgactggcctcttcggtttcgataaccatcgctggcgatgcaccgagcgccagcaaggtattggcggtaaaggtttgcaccacatcattggtcatgcagtgcacaagaggggaatgttggtgaaaaaggtgtaacgcgtgcgcagattgcgctgaacccagcaggtcgacttgcatagtttgctcctgccataacgtgaagaagcaatgacctggtggtccgtgacttccctacgctggcattatccagatcaggtgatacgggtatttctcagccttcacgcagaagggcaccccgagtcgtttggttgcgatgataaatcgcagaggaggatggtaatgtccagcgcacgcgttgtaaacgaggaaaaacggcagttttacaatcgcgttaataaattatttgatatatgaatccagcaccttcagaacgacatccagatcttcttcacgttttagctcatccccctggtgaacgatgtgttccgtcagatgacctttaatcacttcccgcatcagaccgtttaccgcgccacggatagcagcaatctgttgtaaaactgcagcgcattcgtgcggctcgtcgagcattttcttgagcgccacgacctggccctgaatcttactggcacgcgctttcagtttctgtttatcacggattgtatgagacatggcaacacctggttaacaagaatatgaaaaatcatagcactattaatctactggggggtagtatcaggtactgggggggagtagaatcagattgccgaattaatactaagaattattatcatgaccgaatttacaactcttcttcagcaaggaaacgcctggttcttcatccccagcgccatcttacttggtgcgcttcatggcctggaaccagggcactcaaaaacgatgatggcggcgtttatcatcgccatcaaaggcaccattaaacaagcggtgatgctcggactggcagcaactatttcgcataccgcagtggtctggttaattgcctttggcgggatggtgatcagcaagcgctttactgctcaatcagcagaaccgtggctccagctgatttccgcagtgatcattattagcaccgcgttctggatgttctggcgtacctagcgcggcgaacgcaactggctggagaatatgcacgggcatgattatgagcatcatcatcacgatcacgaacatcaccacgaccatggacatcatcaccatcacgaacatggcgagtatcaggatgcccatgcacgagcccatgccaatgacattaaacgacgctttgatggtagagaggtcaccaactggcaaattttgttatttggcttaaccggtggccttatcccctgcccggcagcaattaccgtgctgttgatatgcattcagttgaaagccctgacactgggcgcaacactggtcgtcagtttcagcattggcctggcgttaacgcttgtcaccgtaggcgttggcgcagcaatcagcgttcagcaggtcgcaaaacgctggagcggatttaacactctcgctaaacgcgccccctatttttccagtctgttgattggcttagtcggtgtgtatatgggcgtacatggcttcatgggcataatgcgataactcaatcctttaggcttgcatgttatcttcagcccaggatgattcttaaatcagctatttccgctgactctctgctcgctaaggatgcttttagggcatcctttcatttacactttttacgaaatcatgggatcactaacaaaatatcgcttgtcagttatattgcatggcaggaaagatatgcgactgatattacagatccccaaagtggagagtttatgaccattaaaaataagatgttgctgggtgcgcttttgctggttaccagtgccgcctgggccgcaccagccaccgcgggttcgaccaatacctcgggaatttctaagtatgagttaagcagtttcattgctgactttaagcatttcaaaccaggcgataccgtcccagagatgtaccgcaccgatgagtacaacattaagcagtggcagttacgtaacctgcccgcgcctgatgccgggacgcactggacctatatgggtggcgcgtacgtgttgatcagcgacaccgacggtaaaatcattaaagcctacgacggtgagattttttatcatcgctaaaaaaagccccctcatcatgagggggaaatgcagacaccttgttattttttattattagccacttgctcgtcttgcttgttattagtcgtatttcacgttgattaatgcggttgcctccagtgcgccagatttaattttatttgtatcgtagacgtagtaactggctgttatcggaattgaaaccgttgtatctgtaagttttgactttgccgcaatttcttttaaatttgtgtatcctttactgctgttagtgatatttaaaagtgtgactggcgaaccattactttcaagaataaatcctacgccattatcttccgcacctttcagtattatgttgctgttggttaacaagtcagaacttgataaatacacctgcattttccgtgatgtttgattttgttgacctaataaatttttacaacgcagaataatatcctcttttttactatttattgttgctttgttacctgtcgctggtaattgtgaaacgggaatactgtctaaagtaattaataaatcgtccggtttgcaggttgtggttatcgggttgtatgacaatgtcagattaaaggaatagacacctgcattttgtgccaatgcatttctgtagctatttacacatgcatcccatgacttgccacctaataaacacagtagaaattgtactgcggcactcccgcgtgtcgatgatgaagcactggataatgtcgcaactccattaatcatcactgaaccgccgccccccgcagaaacattcacttttgcattactggccgcaggtgtcaccgttaccgaataaccactggtgaaactggtctgattatttgacaacgtgatgttgtttttattggtccattcaaaatgtaaatttaatttaatggtatcgttataaagtccaacaataatatccgacgggctcataggggtgatagtatttgtactcacgcatgacgaatcattaaaattaagctcatatgtcgccatttgtgtttgagtaagtgcaaaatccccctgaacaaccaaattgtgctgaacagataactcactataacatgccgcatagctcacaggcataaccatcatcattaatataaatagcattatgcgaatttccatagaaccacctgactattactggcaaatataatttctactttcatcaatctctttaccgaagatgattgtgcatgaaagtccttgttgcttatcaattgccacattaaccgatggcggtacttcattggtgcgaataaataactggcttccctggccgacaacgccaatattatgaccatggatatcattgacttcataaccaaacattaatggttgaccatccgctcttaacgctttaataaaccagggcttgcgctgatcggtatcaaaattaaccagtacaaccgcgccgcgataaggggcggcaattttccggttgccacgtaattctgcttcgctatcgctttgcgacacatccagcatcaggtgattttcccgataaggtgtcattccgtcgtatatcaccactccattacggtttgttgtgcgatatttttgcccattgacataagcatctttaattcctggcgcattcatcacagcaaacgtttcggaaagacggttcgccagattaacgccacccgaccaggcgacaatgccccctgaaacactggctccagcctgtcgataagtactcgactgactataactgccattcactgtcgcaaccggcgcgttccaggtcaaattcgccccagctgtcgtttcatttccctgatgttgatgactcaggttgacaccataattgaactgatcccgactccctactgttcctgataatcccgtattatttgaggcaaacccctgatcatcaaacgtcgttgagttagacatatatatttgccgacgaggcgtcgaaacgtcatcaccccaatcaaagggaatcgatataaaaatattaaaacgtttctcttcatgatgattctcgtcataagcctggcttgccgcgagggtatagcttatccgtcgcaggttgttggaataactcaactgataatccttactactgccgctacgcccccagtaatctcgccataacgtacttaatgacacagacccccaaccttctggcaatgactggctcatattggcggaaaagctatttttgcgaccaaaatcattctggtaataatcggcaatgtcatagacatcgttttcatcacggcgataattatctttattgtttgcccaaacgtgatcgttaaatgtccggtaatcacgcgacgaataacgccaggccgccagaccaaaacgcgtcgacgtttggctcacaaatttgttgtaggcaatttgataactttgcccgtcaaacacatcgccgttgtcttgtttactatgcgacttcgtggcatcgacggaaatggcaccaatgcgtgtattccagccagtccccaaagtaaaggcatagtaattattagcaaccatcgtgccgccatacagcgtcaataagttattaaaaccatactgataacctgcctggacaaaatcactttgcttgctcgcaccttcaatatgactacggcccgctgcaaaatcatattttgatacgccaggttgcaacatattaggtactgccgcataaggcaccagataggtggttaccgaaccgtccgcctctttcacgctgacatcaagatctgctccaccaccggccaactgcaaatctgtaatcgcaaacgggccaggaggaacctctttctgataaaccacaaaaccattctgttcaatagttaccagcgcgttactctgagcaatcccctacacccgtggcgtaaaattttgtttcgagttaggcaacatctgcatatcacgaaacaaccgcacaccgctgaagcgaacagaatcaaaaatatcgcttgatgtgtacatatcacccacgcgaagcgtgccgagaagttgggcaaatccacgttccagatacagggtattgcttttccacacccctggattgttatttgttttactgaaactggcatcagaatgcagttgccaccccagtaaatttaacccgctgttaaaacgtacatatgtactcttactattacccgacgctttatagtcactgtaatactgactcacataataagaggtataaaacgcattaatactccgctcccagttttccggtggaacatagccactttccagttcttccacccaggcctgcgggacactgaaatcgagacgaaaaaccccgatatcccaggtatagctcccaccctgaacaagttgctcaaatgttaaacattgcttaccgctggcgaagttatcgctattaatgcctaaccgcttgataacttctattgataaacatgtttcttgcgggttgtctttaacaataatctcatatttcccgcgccattgcttattgacataaatatcgatgtcatactgccccggtaagggttgattatcatcaagacgaatatttgcaacctgctggtctttcattccacctatcataaaatgggtatcaaaggtttcttcagctgcataagcttcaatgccgagcaataacgctacgattgctgatgcaagtggggtcattctcaacataggcagctcctgcaattaaattttgtcactaatatagttgccgtggtcatcgataatggtcagataccagttatttgcattattacttttgacattaacactctgactttctaagggggcaatcataatagtttcataattgactttaacattattagctttgacatccgaaatcgtcacccaattagctgagtcattttttatcaccaatccattgccactgcgatttaccagtaactttttaaaggtcgctttatttaccggagcaatacccgctggccggtaaaacaacttaattctgttttgcatcgcaaacttcagtgcatttttgccttcttgctctggactatttggtggaatatccagaacattcagataaaaaatgctttctttattagtgggcagtttattcggcataattttgatttttacttgctgcccggaatttgcccctatttttgccactggtggcgttaacatgaaaggaacctgaattttttctggtggtaacgacgtatcgccatcatcaatccacgcctgcagcagcgaagaacggtttccctggttcatcaactgcaccataacttctttattttctgccgggtaaataatacgcgtcccgtagataacaattccggcatgtgcaggaaggaccatagaaaaaatgagtaaagataataatcctttcatcttaatgcctcttaaattaaaaagccgccatggggatagcggccatgtttattacctggagaaacttgcaattttatttattaatcctgcgccacacgcataaccagagaagataacacatcacctgattgcactgagttatctgttagtttcaggtattttgctttaaacggaatagcatattgaccttccgctgttttataactctcaatattaaaaggtgcagaaacatccaggacatcgctgttatcacctaaatagagatagtaacccacggtatcgttgctactggctatcgccttatcgttgccggttattttgtcgttggtaatcaacgagagttttacaccagcaacttctttcgggcagctaatttttaacatgctgctggttacaccgactgcatcatcataggtagaatatttagctttaccttcaaagacagtggttggtacagtcggcatattaatacttactgaatcaccacccgcttcgaatttacacggagattctgcaatatttcctttaatggttaatgttccggtatcaacgtctgcagcaaatactccagcgctcataaaaaaagaagaaaagacagcggcagcaataattgaacgtttcataatatgttccttaataaaatttatttttggttgttaagagtctgtatctcttggaaacaaatttctcacatcaaaaaagttgccgcaatgtaaacatattgttttattgatttaaaacaaattaaccaatgcaatataaatacaacaaatacttaagagtattaaatatttatcgcatctattaattaatgtagatttatgtaaatggtattgttgatatcaataaaaaagccgaaatcatttatataaatgatttcggctttctaaatgcaattaaaatcaggttgccaaattaatcgtagcgatttaacacgattcgacgtttgctatcgctacctgcaacaaccacttctgtcgtaacacctttgacgggcgaagaaacctgatgacgggtgtcaacattatacgttaactgaccacaatgctgttgtggttgactattaaccatagccatactgcatgttgggggactgatcctgccattaatcgttaatgtggcagtctctgaagagaatgcgggagaagccaatccataggcaagaaaaataattcctgacagccaatacttattcattgaacgttatccctgtagtaaaggttatgcctggatagaatgagtgcataacaaactatagctgtacatccactacacagccacgaaggatgataatgaagcattgcctgtacgatcaatcgactttgtagagtttcggacgaaggtccgcagaatattcgcagtattaaataagtgttcattaatgcggcaaaaacaattacaccgcatcaatgtaacatctctgcggtgtatgaagaataaccagaatggttaataggcgttagaccgcgcggaaggaaatctcgcctggaatgacttcaccctgccagtagagctgagctgcaacgcggtcagccagctggcggtagatagcggtaaattcgctctccggacggctgataaccgttggcgtgcctttatcgagatcctcacgtaaggagatgtgtaacggcatctgccccagcagctgtgtatggtatttttcagccagtttctctgcaccaccggtaccgaaaatcggttcatggtgaccacagttactgcaaatatgcacactcatgttctcgacaataccgagcaccggaacctcgactttctcgaacatcacaatgccttttttcgcatcgatcaacgcgatgtcctgcggggtggtgaccacgactgcaccagttactggaatgttttgcgccagcgtcaattgaatgtcaccggtgcctggcggcatatcaagcaccagatagtcgagatccggccacaaggtttcctgcaacatctgcattaacgccttgctcgccatcggtccacgccataccatcgcattgtcgtcagtgaccagataaccaattgaattggttgccaggccatgagacataatcggtgccatatgggtaccgtccggcgaagttggacgctgattttctgcgcccaacattgttgggattgatgggccgtagatatcggcgtccagaatgccgactttcgccccttctgccgccagcgccagtgccaggtttaccgccgtggacgatttacccacgccgcctttaccggaactcaccgcgataatgttcttcacaccgttaattcccggctgattcttcacgcgtttcagagtggctatgttatgcgacagtttccagtcgatagctttcgccccggtgatgcgcagcagttcggcgctacattgctcttttaactcttcgaacgcgctatgccagacaaacggcataaccagttccacatgcaacgtgtcgtccatccaggcgacatggtgcaacgctttcagcgtggtgaggttatgcttcagggttgggtgctgaaaattggccagtgtcccggcgaccattgcgcgcaaggcttctggtgatttggcctgggattgttcgttcatcccgactccttttttgtatagataaaccatcagctgatagtttacctgaagaatatagagaagtacttacttaacattttcccatttggtactatctaaccccttttcactattaagaagtaatgcctactatgactcaagtcgcgaagaaaattctggtgacgtgcgcactgccgtacgctaacggctcaatccacctcggccatatgctggagcacatccaggctgatgtctgggtccgttaccagcgaatgcgcggccacgagctcaacttcatctgcgccgacgatgcccacggtacaccgatcatgctgaaagctcagcagcttggtatcaccccggagcagatgattggcgaaatgagtcaggagcatcagactgatttcgcaggctttaacatcagctatgacaactatcactcgacgcacagcgaagagaaccgccagttgtctgagcttatctatactcgcttgaaagaaaacggttttattaaaaaccgcaccatctctcagctgtacgatccggaaaaaggcatgttcctgccggaccgttttgtgaaaggcacctgcccgaaatgtaaatccccggatcaatacggcgataactgcgaagtctgcggcgcgacctacagcccgactgaactgatcgagccgaaatcggtggtttctggcgctaccccggtaatgcgtgattctgaacacttcttctttgatctaccctctttcagcgaaatgttgcaggcatggacccgcagcggtgcgttgcaggagcaggtggcaaacaaaatgcaggagtggtttgaatccggcctgcaacagtgggatatctcccgcgatgccccttatttcggttttgaaattccgaacgcgccgggcaaatatttctacgtctggctggacgcaccgattggctacatgggttctttcaagaatctgtgcgacaagcgcggcgacagcgtaagcttcgatgaatactggaagaaagactccaccgccgagctgtaccacttcatcggtaaagatattgtttacttccacagcctgttctggcctgccatgctggaaggcagcaacttccgcaagccgaccaacctgtttgttcatggctatgtgacggtgaacggcgcaaagatgtccaagtctcgcggcacctttattaaagccagcacctggctgaatcattttgacgctgacagcctgcgttactactacactgcgaaactctcttcgcgcattgatgatatcgatctcaacctggaggatttcgttcagcgtgtgaatgccgatatcgtgaacaaagtggttaacctggcctctcgtaatgcgggctttatcaacaagcgttttgacggcgtgctggcaagcgaactggctgacccgcagttgtacaaaaccttcactgatgccgctgaagtgattggtgaagcgtgggaaagccgcgaatttggtaaagcagtgcgcgaaatcatggcgctggctgatctggctaaccgctatgtcgacgagcaggctccgtgggtggtggcaaaacaggaaggccgcgatgccgacctgcaggcaatttgctcaatgggcataaacctgttccgcgtgctgatgacttacctgaagccggtactgccgaaactgaccgagcgcgcagaagcattcctcaatacagaactgacctgggatggtatccagcaaccgctgctgggccacaaagtgaatccgttcaaagcgctgtataaccgcatcgatatgaagcaggttgaagcactggtggaagcgtctaaagaagaagtgaaagcagctgccgcgccagttactggcccactggcagatgatccgattcaggaaaccatcacctttgacgacttcgcaaaagttgacctgcgcgtggcgctgatcgaaaacgcagagtttgttgaaggttctgacaaactgctgcgcctgacactggatctcggcggtgaaaaacgcaatgtcttctccggtattcgttctgcctacccggatccgcaggcactgatcgggcgtcacaccattatggtggccaacctggcaccgcgtaaaatgcgctttggtatctccgaaggcatggtaatggctgctggtcctggcgggaaagatatcttcctgttaagcccggatgctggtgctaaaccaggccatcaggtgaaataatcccccttcaaggcgctgcatcgacagcgccttttctttataaattcctaaagttgttttcttgcgattttgtctctctctaacccgcataaatactggtagcatctgcattcaactggataaaattacagggatgcagaatgagacactttatctatcaggacgaaaaatcacataaattctgggcagttgagcaacagggaaacgagttgcatatcagttggggaaaagttggcaccaaagggcaaagccagataaaaagtttttcagatgctgcggcagcggcaaaagcggagcttaagctgattgcggagaaggtgaagaaggggtatgtggagcaagcgaaggataattctttgcaaccttcccaaacggtaacgggctctctcaaggtagcggacttatccaccattattcaggaacaaccctctttcgtagcagaaacccgtgcgcctgacaaaaatacagatgctgttttaccgtggctggcgaaagatattgctgtcgtttttccgcccgaagttgtacacaccacgttaagtcatcgccgctttcccggagttcctgttcagcaagcagacaaattgacccaattacgtcgcttagcctgtagtgtgtcgcaacgggataataaaacagccacatttgacttcagcgcctgttctttagaatggcaaaacaccgtcgcccaggcgatcagtcagatcgacggcctgaaaacaacacagctaccatcaccagtaatggctgtactcacggcacttgaaatgaaatgcacaagatataaagtgcgtgaggatgttatggatcagatcgtccaggaaggcggtctggaatatgctactgatgtaataatacaccttcaacagattgatattaaatgggattatgcgaataatgtcattattattctgccgtctggcattgcacctgactacttggagcaatattccagatttgaattacgcctacgtaaacatttatcactggcggaagagtctctctggcaaaaatgtgcacaaaaacttattgccgcaattccacatattccagaatggcggcaaccattaattgctttgttattacccgaaaaaccagaaattgcacatgaaattgcccagcgtctactggggcaaaaaaaattaccctcgcttgagtggttaaaaatagtggcgactgatgagcacattcttgcctcattagaaaaatatcacgagccatatgccatttttgatgattactattgtggtgcgatatggtcagccaccgtattacaggagcaaggtgttgcagccctgccccgatttgctccctatgccgcaagtgactactgcgccgatgtgttgcgtcatatcaatcatccgttcgcattaacactgcttatacgtgtagccgggcatactaaacgctgtcacgatcggatgacgaaagccattgctgcgttcccacatgcagcaatggcggcactgacggaacttcttgggcaaaaagaagagaacagttggcgcattatgctaatgacaatgcttatctcacaaccagcactggcagaacaggtcattccctggctctcgacacccgcagttgccgtactgaaatcatgccagcaacaactgacacagccctcaaaccatgccagcgccgatctactgccagccgtagtagtctcccctccctggctttcgaaaaagaaaaaatcgccgattccggtgctggatttagcgccattaggcattgagccaatctgttatctgacagaagaaatcagtaatcaacttttggcgaaatatatctggtattcaaaacacatcacggttagccatgaagaaagtactaccaacctgttggcaaggatgggttttcaacgacggatcgctggtacatatattaaagctcccgaagcggtagttgaggcatggctaaatgaagattattcaaccttactaagtgaattgaaggtgtttcattcacctaccgggcattattggcagttggggattttgacaacattgccgctggagaaagcagtaaaagcatggaatgcccttaccctatctccacataccgataccgaatacgccatgttacattttggactcaaagggttacctgggttagtaaactcacttgcacgctatccacaagaagccttgcccatcacgaattacttcgcagcgagtgagctggctcctgccgtcgcccgtgccttcaacaaactgaaaacgctacgcgaaaacgcccgtagctggctgttgaaatacccggaacatgcccttaccggcctgctgcctgcggcgctcggcaaagccggtgaagcacaggataacgcccgcgctgccttgcgtatgcttaccgaaaacggtcatcagccattactgcaagaaatcgcccgacgttataaccagccggaagtaaccgatgcggtgaacgctctgcttgcgctcgatcccttagataatcacccgacaaaaatccccactcttccggccttttatcagccatcgctctggacgcgcccggtattaaaagcaaatgcccaatcactgccagatagcgccctcctccacctcggtgaaatgctccgcttccctcaggaagaggctctgtatccgggattattgcaggtgaaagacgtctgttccgccgactcactggcgggatttgcctgggatctgtttaccgcctggcagaccgctggcgcgccgtcgaaagagagttgggcgttcactgcgttaggcgttctcggtaacgatgacaccgcccgcaaactgacgccattaatacgcgcctggcctggtgaatcccagcataaacgcgccaccgttgggttggatattctcgctgctatcggtagtgatatcgcccttatgcagcttaacggcatcgcccagaaactgaaattcaaagcattacaggagcgggcaaaagaaaaaattgccgacattgccgagagccgcgaactcacggtggcggagcttgaagatcggttagcaccggatctcggtctggatgataacggttcgctgctgctggattttggcccacggcagttcaccgtcagctttgatgaaaccttaaaaccgtttgtgcgtgatgtttccggcagccgcctgaaagacctgcccaaaccgaacaaaagcgatgatgaaacgcgggcgaatgatgcggttaaccgctacaaattgctgaaaaaagatgcgcgtaccatcgccgcccagcaggtagcaaggctggaatccgccatgtgcctgcgccgccgctggtcgctggaaaacttccagctcttcctggttgagcatccgctggttcgtcacttaacccgccgtctgatttggggcgtttatagcgccgaaaaccagctactggcttgctttcgcgtagcagaagataacagctacagcaccgctgacgatgatcttttcaccctgccggaaggcgatatctctatcggcactcctcacgttctggaaatatcaccaacggatgctgccgcctttggtcagctttttgccgactacgaactgctaccaccgttccgccagctcgaccgtaacagctacgccctgacagaagccgagcgcaatgccagtgaactgacccgctgggcaggcagaaaatgcccgagtggtcgggtcatggggcaggcgaataaaggctggataaagggcgaaccacaggatggaggctggatcggatggatgatcaaacctttgggtcgctggtcgttaatcatggaaatcgacgaaggttttgcggtgggtatgtcaccagccgaacttagcgctgagcagctcttaagcaagctgtggttatgggaaggcaaagcggaaagctatggctgggggagtaattcaacacaggaagcgcagttctccgtactcgatgccatcaccgccagcgagctaattaacgatattgaagccctgtttgaataaggaaagagcatggacaaggaattaccgtggctggcggataacgcccaactggaactgaaatataaaaaaggcaaaacaccactcagtcatcgcaaatgaccgggcgaaccggtgcctgttatcactgaaagcatcattcagacactgggtgatgaattgctacaaaaagctgagaagaaaaaaaacattgtctggcgttatgaaaatttttcactggagtggcagtccgccattacgcaggccatcaacttgatcggcgaacacaaaccctcagtcccggcccgcacaatggcggcactagcctgtatcgcgcaaaatgacaaccaacagttgctcgacgaaatcgtccaacaagaggggctggaatatgcgactgaggtggtgattgcacgccagtttattgcacggtgttatgagagtgatcctctggtagtcacattgcagtatcagaacgaggactatggctatggttatcgctcagaaacctataacgaattcgatctccgactgcgtaaacacctctctctggcagaggaaagccgctggcagcgttgcgccgacaaactcattgccgcactgccaggaataaccaaagttcgccgcccttttattgcgctgatcctccccgaaaaaccagaaatcgccaatgagttggtaagccttgaatgcccgcggactcattttcattctaaggagtggttaaaagttgttgctactgaccccaaagcggtgagaaaactcgaacgctactggagccaggatatatttagcgatcgagaagccagctacatgtcgcatgaaaaccacttcggctacgcggcctgcgccgcccttttgcgcgaacaaggactggcagccgttccgcgcctcgcgatatatgcccataaagaagattgcggcagtctgctggtacaaattaaccatccgcaagtcatccgcaccttgctgttagttgctgataaaaacaaacccagcctgcaacgtgtggctaaatacagtaaaaacttcccccatgcgacactcgccgcactggcagaactgctggcgttaaaagaaccaccagcccgcccaggttatccaatcatcgaagacaaaaagctgcctgcacagcaaaaagctcgagatgaatactggcgtacgctgttacaaacgctgatagcatcgcagccacaactagcagaaagggtgatgccgtggttaagtactcaagcccagtcagtggtgaagcgttatttatcggcatcgccaaaaccggttattgatagcaccgataacagcggtctgcctgaaatgctcgtttcaccaccgtggcgtagtaagaaaaaaatgacagctccacgtcttgatttggcaccgctcgaattaactccgcaagtttactggcaaccaggcgaacaagagaggcttgccgccactgagtctgcccgttatttcagcacggaatctcttgcggaacgcatggaacaaaaaagtggacgagttgtattacaggaactgggttttggggatgatgtatggctgtttctgaattatatactccccggaaaactggatgctgcacgcaattcactcattgttcagtggcattactaccaggggcgggttgaagagatcctgaatggctggaactccccggaagcacaattagcagaacaggcgctccgcagcggtcacatagaagcgttaattaacatatgggaaaatgacaactactcacgttatcgtccggaaaagagtgtctggaacctgtatttattggcacagttgccgcgtgagatggctttgaccttctggctgcgtatcaatgagaaaaagcatctgttcgcgggtgaggactattttctcagtatcctcggattggatgcgctaccaggtctgctgttggctttttcacatcgtccaaaagaaacatttccgttaattttaaatttcggcgcaacagaactggccctgcccgttgcccgcgtctggcaccgttttgcgggccagcgtaatctggctcgccagtggattttacaatggccggaacatacggctactgcacttattccactcgtctttgttaaaccctgcgacaacagcgaagcggcattatttgcccttcgtttactgtatgaacaaggacatagtgaattactgcaaacggttgcaaaccgctgggatcgcgctgatatgtggccagccctggaaaaaatacttacccagaacccgatggaaatttacccggcacgcattccaaaagcccctgatttctggcatccgcaaatgtggtccaggccgcgccttatcactaataatcaaactgttaccaatgacgctctggaaattatcggcgaaatgctgcgctttacccaggggggacgtttttatagcgggctggaacaactgaaaacgttctgccagccacaaacgctggcagcttttgcttgggatctcttcactgcgtggcaacaagctggtgcctccgcaaaagacaactgggcatttctggcgttaagtctctttggtgacgaaagcacggcacgggatctgacgacacagatcctcgcctggccacaagaaggcaaatctgcccgtgctgtcagcggcctgaacatccttaccctgatgaataatgatatggcgctgatacagctgcatcatatatcgcaacgggctaaatcccgccccttacgtgataacgcggcggaatttcttcaggtggtcgcagaaaatcgcgggctaagccaggaagagctagcggacagattagtcccaaccctgggccttgatgatccgcaggcgttgagttttgattttggtccccggcagtttaccgttcgcttcgatgaaaatctcaacccggttatctttgatcagcaaaacgttcgccagaaaagcgttccccgtttgcgcgccgatgacgatcaactgaaagcgcccgaggcactggcccgactaaaagggctaaaaaaagatgctactcaggtgagcaaaaacctgctcccgcgtcttgaaacggccctacgtaccacccgacgctggtcgctggcagattttcattctctgtttgttaatcatccctttacccgtctggttacccagcgattaatatggggggtttatccggcaaatgaaccgcgttgtttactcaaagcctttcgtgtggccgcagagggggagttctgcaatgcgcaagatgagccaattgacctgcctgcggacgctctgattggcattgcccacccgttagaaatgacagcagaaatgcgcagtgaatttgcacagctttttgccgattacgaaattatgccgccttttcgccagttgtcgcgccgcacggtgctgctcacacctgacgagtcaaccagtaacagcctgactcgctgggaaggtaaatccgctaccgttgggcaacttatgggaatgcgatacaaaggctgggagtcaggctatgaggacgcatttgtctataacctgggtgagtaccggctggtccttaagttttcacccggttttaaccactacaatgttgatagcaaagcgctaatgagcttccgttctcttcgagtgtaccgtgacaataaatccgtcacttttgccgaacttgatgtgtttgatttgagtgaggcgttaagcgcacctgacgtcattttccattaaaacacagcgggcagtgatgcaactgcccgttatcaacacgacttaccagcggggaaagcgatgatcgtgcaaaaagagctggttgctatttacgattatgaggtccctgtacctgaagatccgttttccttcagacttgagatccataaatgctctgaattatttacaggttccgtctatcgactggagcgattccggctacgtccaacatttcatcaacgtgatcgagaagatgctgacccgctaataaatgatgcgttgatttatataagagatgagtgtattgatgagcggaaattacgaggtgaatcacctgaaactgtaatagcaatttttaatcgtaaactacagaatatattcaaccaactaatagaatattactttattaaagggggaagcggttttcccccttagttgcgtttcaatttgcccattacttcaacaaatcaatcaaccgtaacagagccactaatagctccagtacggcaatgagcacggttaacttttgtgtcagcgtgtccatccgctctccttattaaggnnnnnnnnnnnnnnnnnnnnnnnnnnnnnnnnnnnnnnnnnnnnnnnnnnnnnnnnnnnnnnnnnnnnnnnnnnnnnnnnnnnnnnnnnnnnnnnnnnngcaatgagcacggttaacttttgtgtcagcgtgtccatccgctctccttattaaggagcgcaacaccagcaccttacccttacactgcctgtcgatactggtttacgtttgttgagtcgccatgttgcactccggatcagagcactacctgcggcaccacccgtccggtagccaggacttgaaatgggttcgatccggcgcaacttcccaacagtcaggattataaatctcattatcttaattgcaacactgtccagaggtggttataattcgttcgttgagatgccatgttgcactatcagtaatttaacatcaaagtagtaaataaaagaacctgcctcaccagcaggtttttttatttactgtgatctgctttccagatattttttgccaatagcccaccataaatattcacatcccggtcaaacggtacgttgaatataaaatcgatgaatttataaataaaaatgagttatatgatgaattaataaaaacagtaatcattttattaaagggggaagcagttttcccccttagatgcgtttcaatttgcccgttacttcaacaaatcaatcaaccgtaacagagccactaatagctccagtacagcaatgagcacggttaacttttgtgtcagcgtgtccatccgctctccttattaaggagcgcaacaccagcaccttacccttacactgcctgtcgatactggtttacgtatgttggtacgaaacgttgctctccggatcagggcaccgcctgcggcaccacccgtccagcagccaggacttaaaattggtccgatccggcacaacctcccaacgggcaggattataaatctcattcactgaattgcaatggagtgtggatatggttataatttattcgttggtacgaaatgttgcacaatcagcaagttagcgtcactgtagtaaataaaagaacctgcctcaccagcaggtttttttatttactgcgatctgctttccagatattttccgctcaaacaactaatgcgccaaacatttattgcgcgtaaaatatcgtttatttcattaatacatttcagggatgaatatatgtcaccgcagaataatcatctgcagcgtccgcctgctgctgtgttatacgccgatgaactggcaaaattaaaacaaaatgataacgcaccttgctcgcccggttggcagttaagtttgcctgcggcacgtgcttttatccttggcgatagcgcgcaaaatattagccgtaaagtggtgattagtccctccgctgtcgaacgtatgttagtcactcttgccaccggacgcggtttgatgttggtgggggaacctggcaccgcaaaatctctcctgtctgaattactggcaaccgctattagcggcgatgccgggttaaccatccagggcggcgcatctactaccgaagatcaaatcaagtacggctggaactacgccctgcttatcaatcatggtccatcaacggaagcgctggtccctgccccgctttaccagggaatgcgcgacggcaaaatcgtccgttttgaagagataacgcgtacaccgctggaagtgcaagactgtctgttaggtatgctttctgacagggtgatgacggtgccggaactcactggtgaagccagtcagctctatgcgcgagaaggctttaatattattgccactgccaatacccgcgatcgcggcgtcaatgaaatgagtgctgcgctaaagcgtcgcttcgattttgaaactgtctttccgattatggatttcgcccaggagctggagcttgtcgccagtgcttcggcgcgtttgctggcccatagcggtattccgcataaagtgcctgacgcggtactggagttactggtccgcaccttccgcgatctgcgtgccaacggcgaaaagaaaacgtcaatggatacactaacagcgattatgtccaccgctgaagccgtgaacgttgcccacgccgtaggcgtccgcgcctggtttttagcgaatcgcgcaggtgagccagccgacctggtggactgcattgccggaaccatcgtcaaagataatgaagaagatcgcgctcgtctgcgccgttacttcgaacagcgtgtcgccacacataaagaagctcactggcaggcttattatcaagcccgccaccgcctgccgtgaggaaagatgcatgagcgagccgttaattgtcggcatccggcatcatagtccggcctgcgcccggctggtgaaatcgttaatcgaaagccagcggccacgatacgtgttgattgaaggcccggctgattttaatgaccgggtagacgaactgtttttagcccaccagcttccggtagctatttacagttattgccagtatcaggacggtgcagcccccgggcgtggtgcctggacgccatttgctgaattttcgccggagtggcaggcgctacaagccgctcgtcgtattcaggcacaaacttacttcatcgatttgccttgctgggcgcagagtgaagaagaggacgattcgcctgatacgcaagaggaaagccagaccttgctgctgcgtgccacccgcatggataacagcgacaccctgtgggatcacttgttcgaagatgaaagccagcaaattgcattaccctctgcgctggcgcactattttgcccaactgcgcggcgattcccccggcgatgtactcaatcgtcagcgcgaagcctttatgacccgctggattggatgggcgatgcagaaaaataatggcgacgtgttagttgtctgcggtggctggcacgctccggcactggcaaaaatgtggcgcgaatgcccgcaggaaattaacacgccagaattgccgtcgctggcagatgccgttacaggttgttatctcaccccctacagtgaaaagcgccttgatgtgctggcaggatacctttccggtatgcctgccccggtctggcaaaactggtgctggcagtggggcttgcagaaggcaggtgaacaactgctaaaaactatccttacccgtttgcgccagcacaaattgcccgcttctaccgctgatatggctgccgctcatctgcatgcgatggcgctggcacagttgcgcggtcatacactaccgttacgcactgactggctggatgccatagcaggctcgctgattaaagaagccttgaacgcgccgttgccgtggagctatcgcggagttattcatcccgacactgatccgattctgctaacgttgatagacacattagcgggtgacggattcggtaaacttgccccttctacgccacaaccgcctctgccaaaagatgtcacctgcgaactggaacgtaccgcaatctctcttccggcggagcttaccttaaatcgctttaaccccaatggactagcgcaaagtcaggtgttacatcggctggcaatactggagatcccagggattgtacgccagcagggaagcacactgacacttgcaggcaacggtgaagaacgctggaaattaacccgcccgcttagccagcatgcggcattgattgaggccgcctgctttggtgccacactccaggaagccgcacgccataaattagaagccgatatgctggacgcgggtggaatcggcagtatcaccacatgtcttagccaggcggcgttagcgggtctggcgtccttcagtcaacaattactggagcaactcacattattaatcgcccaggaaaatcaatttgccgaaatgggccaggcgctggaagtgctatatgccttatggcggctggatgaaattagcggtatgcaaggcgcgcagatattacaaacgacgttatgcgcggctatcgatcgcacgctgtggctgtgtgaatctaacggcagaccagatgaaaaggagtttcacgctcacctgcatagctggcaggcgctttgccatatcctgcgcgatctacatagcggcgttaatttacccggcgtttttctttctgcggcggtagccttactggagcgccgcagtcaggcgattcatgtcccggcgctggatcgcggcgcggctcttggcgcactgatgcgtctggaacatcccaacgccagtgccgaagcggcgctgacgatgctggcgcagttatccccggcacaatccggcgaggcgctgcacggtttgctggcgctcgcccgtcatcaactggcctgccaaccagcatttatcgccggtttcagcagccatttgaatcaactgagtgatgccaattttatcaatgccctgcccgatttacgcgcagcgatggcctggctaccgccacgagaacgcgggacactggcgcatcaggtgcttgagcattaccagcttgcgcagcttcctgtttcagcgctgcaaatgccgttgcattgtccaccacaggccattgcacatcatcaacaactcgaacagcaggcactggcatcgctgcaacactggggagttttccatgtctgaactgaacgatcttctgaccacccgtgagctacaacgctggcgattaattcttggcgaagcggcagaaacgacgctttgtgggctggatgacaacgcccggcagatagaccacgcgctggaatggctgtatgggcgcgatcctgaacggctccagcgtggtgaacgctccggtggattaggtggctcaaatctcaccacccctgagtggatcaacagtattcacacgctgtttccgcaacaggtgattgagcggctggaaagcgatgccgtactgcgctatggcattgaagatgtggtgacgaatctcgacgtgctggaacgtatgcagccttctgaaagcctgctacgcgccgttttgcacaccaaacatctgatgaaccccgaagtactggctgccgcccgccggatagtgcgccaggttgttgaagaaattatggctcgactggcaaaggaagttcgtcaggctttttctggtgtccgcgatcgccgtcgccgctcatctattccactggcgcgaaactttgatttcaaaagtactctacgcgccaacctgcaacactggcacccacaacacggcaagttgtatatcgaatccccccgctttaacagccgcattaaacgccaaagcgaacaatggcaactggtcttactggttgatcaaagcggctcgatggtcgattcggtgatccactctgcggtgatggcggcctgtttatggcagttacccggcattcgtacccatctggtcgcttttgacaccagtgtggttgatctcacggcagacgttgccgatccggtagagttattaatgaaagtgcaattaggcggcggaaccaatatcgccagtgccgtggagtatggtcggcaacttattgaacaaccagcgaaaagcgtcattatcctcgtgagcgatttttacgaagggggttcatcatcattactgacgcatcaggtgaaaaagtgtgtccagagcggcatcaaagtgctgggactggcagcgctcgatagcacagcaacgccttgctatgaccgcgatacggcccaggcgctggttaatgtcggcgcacaaatagccgccatgacaccgggcgagctggcatcatggcttgcagagaaccttcagtcatgaattcactacgtccggaattattagaactgacaccgcaggccctgacggcgttaagcaatgccggttttgttaagcgcagccttaaggaactggaaaatggcaacgtcccggaaatcagccatgagaacggcgctttaatcgccaccttcagtgacggtgtccgtacccagctggcgaacggccaggcactgaaagaggctcagtgcacctgcggggccagcggcatgtgccgtcatcgcgtgatgctggtgttaagttatcaacgactttgtaccaccgttcagcctacgggaaaagaagaggaatgggatccggcaatctggctggaagaactggctaccctgcccgatgccacccgcaaacgcgcacaggcgctggtcgctaaaggcatcaccattgagttgttctgtacgccgggcgaaattccctctgcccgattgccgatgagcgatgtgcgtttttattcccgcagcagcattcgtttcgcccgttgtgattgtattgacggcacactttgcgaacatgtcatactggctgtgcaggccttcgtcgaggccaaaactcagcaagcggaatttaaccatttgatctggcagatgcgcagcgaacacgtcacatcatctgacgatccgtttgccagcgaagaaggcaaaacgtgtcgtcaatatgttcagcaattaagccaggcattatggctgagcggcatcagccagccgcttattcactacgaggccgctttcagccgcgcgcagcaagcggcggaacgctgcaactggcgatgggtgagtgaatcgctacggcaactgcgcgccagcgttgatgccttccacgcccgcgcaagccattatcatgccggagaatgcttgtgtcagcttgccgcattaaacagtcgattaaattgcgcacacgaaatggcgcagcgcgacagtgttggtgaaattcctcccatgccgtggcgcacggtcgttggcgcaggcattgccggagaagcaaagcttgatcatctgcggctggtgtctttaggtatgcgttgctggcaggatattgagcattatggtttacgcatctggtttaccgatcccgacaccggcagtattttgcacctttcgcgcagttggccgcgaagtgaacaggaaaactcaccggcagctacgcgtcggctgtttagttttcaggctggcgcactggcgggtgggcaaattgtttcacaagcagcaaaacgcagtgccgatggcgagctgctgttagctacccgcaaccgcttaagcagcgttgtgccgctgtcgcctgatgcctggcaaatgttgagcgcgccgttacgccagccgggcattgtggctttgcgggaatatttacgccagcgtccccccgcctgcatacggcctcttaatcaggtcgataacttatttattctgccggtcgctgagtgtatttcgctcggttgggatagcagccgccagacgctggatgcgcaggtcattagcggcgaaggtgaagataatctgctgacgttatcactgccagcctcagccagcgcgccttatgccgttgaacgcatggcggcgcttttgcaacaaacagaggaccccgtgtgtctggtttctggctttgtcagttttgtagaggggcaattgacactggaaccacaggtaatgatgacaaagactcgtgcctgggcgctggacgctgaaactgcgcctgtggcaccgctaccttctgccagcgttttgcctgtgccgtctactgctcatcagttgctgatacgctgccaggcgttacttattcaactgctccataacggctggcgctatcaggaacaaagtgctattggtcaggcagagttgctggcgaatgacctcaccgccgtgggtttttatcggctggcacatgtgttgggacaatttcgtaatacagaaagcgaggcacgggtagaagcaatgaataacgttgttttgctttgcgaacaattattccccatgcttcagcaacaaggatgaaatagtgctttttactaagagttctactccagttccggactgctcacgccacggtattaggcatatcctatatagcccctggtgagagtcaccagttccttgattaaataaaatggagttttacatgaaggctttcaataagctgttttcccttgttgttgcatctgttctggttttctctcttgctggctgcggtgacaaagaagaatcgaagaaattcagcgccaatctgaacggcactgaaattgccattacctatgtctacaaaggtgacaaggtgcttaagcaatcttctgaaaccaaaattcaatttgcctccataggtactaccaccaaagaagatgctgccagggcacttgagccgttaagcgccaaatacaaaaacatcgcgggtgttgaagaaaaattaacctataccgatacctacgcgcaggaaaacgtgactatcgatatggaaaaagtggattttaaagccctgcagggtatttcaggaatcaacgtttctgctgaagatgccaaaaaaggtatcactatggcgcaaatggaactggtgatgaaagccgctggttttaaagaagtgaaataatctgtcggcggccatgtttcgcatggccgccatacccgtcttagcttttcttcacatgctggcgcgctgccagtccacgcagaaaataacgtaaaaattgatcgccgcattcgcggaagtttttatgatccggtgcacgcatcatcgccgtaatttccggcatcgaaacgcggaactgctgttcggtgaggatcgccagaatgtcatcggttttcagcgaaaacgcgatgcgtaattttttcagcacgatgttgttattaatgcgacgttccggctccagtgccggagcagactcatccttgccgcgtttttcataaatcaggccattgaggaatgacgacaaaacaatgtccggacaacgctgaaaaccctcttcgtcttctttacgtagccagacggcgatctgttccgcggtggcttcgacattacccagcgccagaatacgcaccaggtcattattattggctttcaaaatgtagcgcacgctgcgcagaatatcgttacttagcatgaggccttcaggtgttgatgaggcaaaaagccattttagcagtcttttacaggccaatcgcctcttttaagcttttcagataacggcggctgaccggcacggttaagccattacgcaaaatcaactcggcctgaccgttatcttccagacgaatctcctgtaaatgcgcgaggttaaccagatactgacgatggcagcgcagtagtggtgtacgactttccagggtacgtaatgtcaattcggtaaagccctctttcccttcgtggctggtaacgtagacaccgctcatccgactgctgacaaatgccacatctttcatttgcagcaaataaatccgactatgccccgtacaagggataaatttcagcgcctgttgattttccggtaacagcgaaacatcctgcttgctgcgttcctgacgcaaacgcgccagcgttttctccagtcgcgcttcatcaattggcttcagcagataatcaaaggcatgttcttcaaaggctttaatagcgtattcgtcaaacgcggtgagaaaaacaatatacggacgatgttccgggtcaagcatccccaccatttccagaccactgatgcgcggcatctggatatcgagaaacagcacatccgggcgcagtttatgcaccgcgccgatcccttccacggcgtttgaacactctccaacgatttcaatatcgctctgctcctgcaaaaatacgcgcaggttctcccgtgctaacggttcatcatcgacaattaagactttaatcatgcctcgtccctccatggtagtcgtaacgttattcgggtgtaactatcaggctcacaggcgacgcttatcccatagtcatcgccaaaccgttcacgtaaacgcttatccaccagattcatccccagcccactggcattggttaccggttgatacaaaccggcattgtcttcgatctccagcatcaaatgttgcccctcacgtcgggcgctgattgccactcgccctgtatccagcagttgtgatgtcccatgtttaatggcgttttccactatcggttgcagggtaaacgcgggcaattgctgctgggataattcttgcggaatagcaatgttgacctgcaaccgcgactggaagcgcgccttttcaatttgcagataagcattcacatgttcaatttcgtcggcgagagtaacaaactccgaaggccgctttaagtttttgcggaaaaaagtggaaagatactgcaccagctggctggcctgttcgctgtcgcgacggatcaccgctttaatggtgttaagcgcattaaacaaaaaatgggggttcacctgggcgtgaagcagtttgatctctgactgggtgagcatcgctttttgccgctcatattgcccggcaaggatctgcgccgaaagcaattgcgcaatcccctcacccaacgtgcggttgattgaactgaataaacggtttttggcttcatacaatttgatggtgcccatcacccgctgattttcaccacgcaacggaattaccagcgtcgaccccagtttgcattgcggatgcaaagagcaacggtaaggtacttcgttgccatcagcgtagaccacttcaccggtttcaatcgcttttaaagtataagttgaagaaatcggtttgccgggtaaatggtggtcgtcaccaattccggtaaaggccagcaatttctctcgatcggtaatcgcgactgcaccaatatccagttcctgatacagcacctgagccactttcatgctgttcacttcgttaaacccctggcgcaaaatgccttccgtcgaggctgccactttcagcgcagtggcagaaaaagccgaagtgtatttttcaaacatcgcgcgtttatcgagcaatatacgcataaacagcgccgcgccgacggtattggtgaccatcattggcgcagcaatattactcaccagacgcaccgcatcttcataaggtcgggcgatcgcaaggatgatcagcatttgcaccatttcagcgacgaacgtgacggcaccggcggtaatggggttaaagactttatcagtgcgcccgcggcggatcaggatgctgtgtaccaggccaccgagtaatccttcaacgatggtcgagatcatgcaacttaacgcggtcatgccccccatcgaatatcgatgtaagccgccggtcagcccaaccagcccaccgacgaccggaccgccgagtaagccgcccattaccgcgcctatcgcacgggtattggcaatagaatcgtcaatgtgcaacccaaaccaggtgcccatgatgcagaagatggaaaagacgatgtagcagagaaatttatgcggcagacgaaccgtgacctgcattaacggtatgaataatggcgttttactcattaaccatgcaatgactaaaaaaacgcacatctgctgaagcagcagcaacaccagattaaaatcgtacatacccgcaaaccacacttccctttaaaacgcgtaacatacattgcctgcgtttaactttctttgaactcttgcagaaaaatgagaattcgtgagtacgatcactcaaaatcgcctggcaaaaataaaatcaccctatagatgcacaaaaaacgggcaaaactacctggttcgcaaaactgcgtctaaagttaaactgggacctcgcgagcaagggtgagacgatggcgctttacacaattggtgaagtggcgttgctttgtgatattaatcctgtcacgttacgcgcgtggcagaggcgttacggattgctgaaaccgcaacggacagacggcggtcatcggctgttcaacgatgccgatattgaccggatccgcgagatcaaacgctggatcgacaacggcgtgcaggtcagcaaagttaaaatgctgctcagtaatgaaaatgttgatgtgcagaacggctggcgcgatcagcaagaaacattactgacttacctgcaaagcggcaatctacatagcctgcgaacgtggatcaaagagcgcggtcaggattaccccgcccagacactcaccacacatctgtttattcctctgcgccgacggcttcagtgccaacaaccgactctccaggcgctgctggcgatcctcgacggcgtactgatcaactacatcgccatttgtctggcttcggcacgtaaaaaacagggtaaagatgcgctggtggttggctggaatattcaggataccacccgtctgtggctggagggctggattgccagtcaacaaggatggcgcattgatgtcctcgcccactcgctcaatcaactacgccctgaactattcgaaggccgtacattgctggtgtggtgcggtgaaaatcgaacctccgcccaacagcagcaactcaccagttggcaagaacaaggccatgatattttcccactcggcatttaatgattcgttaacaaatgcgctttactgtacaatcctttcgttaacataaggagtgcattatgcgcatagctaaaattggggtcatcgccctgttcctgtttatggcgttaggcggaattggtggcgtcatgctcgcaggttatacctttattttgcgtgctggctaagcgcctgcaccagcctttcaaacaggcggtctgcgatgatcgccgccagtgccaccagtaacgccccctggatcacatacgcggtattaaatccgctaagcccgatgatgatgggcgtacccagcgtgctggcccctaccgttgaggcgatcgtcgccgtaccaatgttgataatcaccgaagttcgcacgcccgccagaatcaccggagccgccagcggtagctcgaccttacgcagtcgctgaccacgactcattcccatacctttcgcaacttctgtcacgctggcatcaatcgctcccagcccggcaagtgtcgcctgcaggacgggcagcacaccgtaaaggatcaaggcgataatcgctggttgcagaccaaagccgatcaccggaacggcgatcgccagcactgcgacgggcggaaaagtctgtccaacggcggcaatagtttccaccagtgggcgaaattccgcgccccacgggcgagtgacagcaattccggcaccagtgccaatgatcaccgcaaacaaactcgaaattcccaccagccagaaatgagccagtgccagagctgcaaaactttcttgctgataaacgggtcgtggcagttgtgggaacaaggcagcaaacagcggctggctgtaaggcagccagaaaatcagcgccacaaacagagcaatgagccagaacagcggatcgcgcaacatcttcatacgcttacgcctccaccagcagatcctgaaaatgcagcgtgccgcaaggctggccctgcatgttcaccaccggcagcacctcgcatccccgcgcaacaaacagagagagcgcatcgcgtagcgtcatctcttctgccagtgcctcaccatctgctcgttcttcgcgacgcacgtaatccgccacactacgtaacgaaagcaggcgcacacccagttcactacgtccaaaaaactggcggacaaaatcattcgccggacgagtcagcatcgtcagcggattgccctgctgcactacttcaccgtgatccatcaataccagatgttctgccagccgtagcgcctcatcaatatcatgagtgaccagcacaatggtacgccccagcaaacggtgaatgcgcgtcatctcttgttgcaacgcgccgcgcgttaccgggtccagtgcgccaaaaggttcatccattagtaagacttgcggatcggcagccagtgcacgcgccactcccacacgttgctgctgaccaccggaaagctgatgcggataacgctcacgcaaatttgactccagccccagtagcgccattaattcgtcgatacgatcgtcaatccgcgcccgcgaccatttttgtaattgcggcacggtagcgatgttttgcgccacgctccagtgggggaacaggccaatagattgaatggcatagcccatccggcggcgcaactccagtactggcagcgagcgaatttcttctccggcaaagcggatctctccgctgtcatgctccaccaggcggttaatcattttcagggtggtggatttgccggagccagatgtgccaatcagcaccgaaaaactcccttcctgaaaattgagattgagatcgttaacggctttttgtgcgccgaacagtttgctgacatggctaaattcaatcattacgtttcaccttcagcagtgcgataagcaaatcgaacagcgcgtcggtaagcaccgccagaacaattaccgggatcacccccagcaacactaaatcaatggcgctgcttagcagcccctggaaaaccagcgcaccaaaaccgcctgcgccgattaacgccgcaatcaccgccatacctacagtttgcaccatcaccacccgcaggctgcgcagaaataccggtaacgccagcggtaactgaacatgcaggaaacgctgcgccccgctcatccccatcgctctggcgctttccagcacatcgcgcgggatctggttcaaaccgactaccacgccgcgcaccagcggcagcaaggcatagagcaccagcgcaatcagtgcgggtgtcattccggttcctgctatgccgagcgtccccagccacggaaaggccgtaaccagcgcggcaagcggcgcaatcaacaggccaaagagcgccaccgaaggcacggtctgaatcacattgagcagagaaaaaattgccccctgccgagcagtggaaaagtagcaccagatgcccaacggcacaccaatcactaacgcaggcagcaccgcaccaaacagcaacgtcagatgttgtgccagcgcgtcgtcaaacacatcctgacggttggcgtattctttcattagtgagagatcgttaagcgtgccggagtacagcaaccacagcggaataatggcaatctgcatatgcaacaaccagcgccacagcggatgcgtggagattcggcggatggcatcgctacaggccagcaatgccagcgccgcagccagccagaaaccactgccgaggctggtacgcgccagcgcactgccattttgcgccagttgggtcgccgcctttccagctccccacaccagcaatacgaagacgaattgcgccagaatgagtgcacaaatgctgccttttttaccgggaataaaacaggccgtcagccaggcgcaaccaacgcccaccagcatccagatcgtttgcggccacagctgccagagatgacgcccctcacccgaaactaaacgattaggcgcgtaactgataaacggcagcgccgctgcgattgccgtcagcaacagcagcagcgccagaacaggattaatacggaaataagtcacgggaaattacttcgtccaccctttttgtttcaggtagtcggcagccacttttttggcatccagtccttccacagcaatgctggcattcagttgctgcaatgtttttgcatcgaggctggcgaagactggctgtagccactgtgccatttgcggatactccctcaacaccgactcacgcaccactggtgcaggcgcgtagataggttgcacaccttgcggatcgcttaaggtttgcagccccagcgccgctaccgggccgtcagtgccgtaagccattgcagcattaacgccagaggtttgctgggcagcggctttgatcgtcaccgccgtgtcgccaccagccagtgacagcaactgatcctgaccgagcttaaagccataggctttttcaaacgcgggtaacgcatcggcgcgttcgataaactctgccgaggctgccagtttgaaggtgccgccctcttgcagataacgactcaggtcggcaagcgaagtgagtttatttttctctgccacatcctgacgcacggcgatagtccaggtgttatttgcaggcgcgggcgtcagccagattaacttgttgtgctccgaatcgagctttttgactttctcgtaaccttgctgcgcgtttttccacgctgcatcgttttcatctttaaagaagaaagcgccattgccggtatattccggatagatatccagttcaccggaagtaatcgccccgcgcaccacaggagtcgttccgagttgcactttattcaccgtcggtacgccgtggctttccagcacctgcaaaatgatattgccgagtagcgcaccttcggtatcgatttttgaaccgactttaacgggggaagccgcctgtagcggcaggctcacggctgccaacataaccagtgaacctgcccagagctttaagagtggcatgatgctttcctcattcttttactgttgttttcagcgaattaagagaaaagcatagttgataatggcggggttagcttgagcggaaggattcagttgcagaatcagataaatacttaagaggcatattcggtccggcgtttcctgccggatgcggcgcgagcgccttatccggcctacaaagggcgcaaacgtcgcgcccttactaaagcattacagcaactcaaactcgcctttcttaacgcgtgcggaatcagtgccgataaagacattgaacttgccaggctcggcgtcatatttcatctgttgattccagaacttcagcgcctcaatatcgatcgggaagctgacagtctgagtttcgcccggtttcagggtgattttctcaaagcctttcagctgtttcacagggcgactcatggaagccgtcacatcctgcaagtacatctgcactaccgtggcaccctcgcgcttaccggtgttcgtcacctgcacgctggcagtcactttgccgtcacgcttcatggtcggcgcagaaagtttcacatcagagacggtgaaagtggtgtagctcagcccatagccgaacggatacaacgccccgttagcttcatcaaaataacgcgaagtgtatttgttcggcttgtcggcattatacgggcgaccggtattcagatggctgtagtacaccgggatctgcccgacagaacgcgggaaggacattggcagcttgccggacgggttgtaatcgccaaacaatacatcggcaattgcattaccgccttcagtccccgcaaaccaggtttccagaatcgcatcagcctgctgatcttctttcaccagcgccagcggacgcccgttcatcagcaccagcaccagcggtttaccggtggctttcagcgccgcaatcaagtcacgttggctttgcggaatagtgatatcggtccggctggaggcttcgtgcgccatcccctgtgcttcaccgactacagccaccaccacatcagattgtttcgccgtctgcaccgcttcatcaatcatctcttgcggcgaacgcggatcgactttgaccgcttcttcatactgattcaggaaatcgataatgcctttgtcactggtaacgttcgcccctttggcatacagcactttaccgttttcaccgacggcatttttaatcccggtcagtacggtcacggattgatcggcaacaccggctgcggaccagctgcccatcacgtcacgtttactgtccgccagtggcccaaccaccgcaatggtggccgattttttcagcggtaacgtttcgagacggtttttcagcaacaccaagctttcgcgcgccacttcacgcgcttctttacggtgcaggcggctttcggcattggtatccaccgggtcagactctttcggccccaaatggctgtatgggtcgttaaacaaccccatatcatatttaacgttcagtacatggcgggcagcatcgtccagctctgccatcgtcactttgccggatttaatcaacccaggcagatacttcgagtagtactcgtcgctcatgctcatgttgattccggatttcagcgccacgcgcaccgcatcttccgggtctgccgccgtgccatgtttaatcagctctttgattgcaccgtgatcggaaacggtgatgcctttaaagccccactggtcgcgcagaacatctttcagcagccaggaatcggaggtggctggcgtgccgttcagcgagttcagcgccaccatcaccgcgccgctgcctgcgtccagccccgctttgtacggcggcatataatcattaaacaggcgctgcggactcatatcgacggtgttgtactctttaccgccttctaccgcgccgtatgcggcaaagtgtttgacgctggtcatcaccgagtagcgatctgccgggcttttaccctgcatcgcttccaccatggttttacccattgttgaggtgagatacgtatcttcgccaaaaccttcggaagcacgtccccagcgcggatcgcgcgagacatcgaccatcggtgcccaggtcatattcaggccatcatctgccgcttcataagcagagacacgtccgaccgttttcactgcatcgaggttaaaagacgaggccagaccgaggctaatcgggaacaccgtgcgctgaccgtgcagcacgtcgtaagcaaagaaaagaggaattttcaggcggcttaattccatcacctgatcctgcatggcgcggatatcctgacgggttacggtgttgaaaatcgccccaacctgaccgtctttgatcatctcgcggatcgcctctttcgggttatccgggccgacgctgattaagcgcagctgaccaattttctcatcaactgtcattttcttaagcagttcggtgacgaacgcatcccgcgcttcgggcgttaatggatggttgccgaataaatcatccgccagtgctggctgcagggccagactcaccgcgattcctactgaacatagccatttcatatggatttttcttcctttgttgcccgacgtggcagcgaaaatggtgcaaaaaccgtagtttgccataagcatgatggagagagaaaaagaatgctcagtttattgtctgaattttcaaaatattcactcgctgaattgttatacaaggcgctattctagtttgtgatattttttcgccaccacaaggagtggaaaatgtcttccatgacaacaactgataataaagcctttttgaatgaacttgctcgtctggtgggttcttcacacctgctcaccgatcccgcaaaaacggcccgctatcgcaagggcttccgttctggtcagggcgacgcgctggctgtcgttttccctggctcactactagaattgtggcgggtgctgaaagcctgcgtcaccgccgacaaaattattctgatgcaggccgccaatacaggcctgaccgaaggatcgacgccaaacggtaacgattatgatcgcgatgtcgttatcatcagcaccctgcgtctcgacaagctgcacgttcttggcaagggcgaacaggtgctggcctatccgggcaccacgctctattcgctggaaaaagccctcaaaccgctgggacgcgaaccgcactcagtgattggatcatcgtgtataggcgcatcggtcatcggcggtatttgtaacaactccggcggctcgctggtgcaacgtggcccggcgtataccgaaatgtcgttattcgcgcgtataaatgaagacggcaaactgacgctggtgaaccatctggggattgatctgggcgaaacgccggagcagatccttagcaagctggatgatgatcgcatcaaagatgacgatgtgcgtcacgatggtcgtcacgcccacgattatgactatgtccaccgcgttcgtgatattgaagccgacacgcccgcacgttataacgccgatcctgatcggttatttgaatcttctggttgcgccgggaagctggcggtctttgcagtacgtcttgataccttcgaagcggaaaaaaatcagcaggtgttttatatcggcaccaaccagccggaagtgctgaccgaaatccgccgtcatattctggctaacttcgaaaatctgccggttgccggggaatatatgcaccgggatatctacgatattgcggaaaaatacggcaaagacaccttcctgatgattgataagttaggcaccgacaagatgccgttcttctttaatctcaagggacgcaccgatgcgatgctggagaaagtgaaattcttccgtccgcattttactgaccgtgcgatgcaaaaattcggtcacctgttccccagccatttaccgccgcgcatgaaaaactggcgcgataaatacgagcatcatctgctgttaaaaatggcgggcgatggcgtgggcgaagccaaatcgtggctggtggattatttcaaacaggccgaaggcgatttctttgtctgtacgccggaggaaggcagcaaagcgtttttacaccgtttcgccgctgcgggcgcagcaattcgttatcaggcggtgcattccgatgaagtcgaagacattctggcgttggatatcgctctgcggcgtaacgacaccgagtggtatgagcatttaccgccggagatcgacagccagctggtgcacaagctctattacggccattttatgtgctatgtcttccatcaggattacatagtgaaaaaaggcgtggatgtgcatgcgttaaaagaacagatgctggaactgctacagcagcgcggcgcgcagtaccctgccgagcataacgtcggtcatttgtataaagcaccggagacgttgcagaagttctatcgcgagaacgatccgaccaacagcatgaatccggggatcggtaaaaccagtaaacggaaaaactggcaggaagtggagtaaaaattacggatggcagagtatcgccatccgaattcacttaatcgttctgtgccgtctgccccgccgccgccatttgggcggctttttgttttttatagctcaacgctgctgccggcacaggcatcactttaccggtttcaatccaggtacgcaggcggctggcatcggcaaaatgggtatatttgccaaacgcgtccatcactaccagcgccaccggtttattattgataaccgtacgcatcaccagacaatggcccgccgcattggtaaagccggttttggttaactgaatattccagttatcgcgatacaccagatgattagtattgcggaacggcagcgtatacgtcggattagagaaggttgccatatcttcccgggtagtacttaactgcccgatcaacggatattgtttgctggcaatgagcagtttggttaagtcacgggcagttgaaacgttatgcaccgacaatccggtaggttcaacaaagcgcgtgttgttcattccgagcgatttcgctttcgcattcattgccttaataaaggctttgtaaccaccgggataatggtgcgcaaggcttgccgccgcgcggttttctgaagacatcagcgccagcaacagcatatctttacggctgatttcgctattcagtcgtacgcgcgaatagacccctttcatctccggcgtctggctgatatccacttttagtttttcatccagcggcagtcgtgcatccagcacaaccatcgcggtcattaatttgctgatagacgcaatcggacgcaccagatccgggtggttcgaatagatcactttgttggtattcagatcaacaatcatcgcgctaccggaggcaatttccggttgtgaagcggtggtagcggctgccgttttcgcaacggcctgcggtgcaaaaggcacagccagcatcagggccaggctaaataaagaaactcgaaatttcggcatgatgagcattcagatagtggttcacgcgcacgggttgcgcaccgccggagtaaggatttactgaggctagcgacgccatcataacgagcaaaaagtgcgatcgtcaaaggagaatcgtgaggaaatgctgcattgctgacatttacgccagcaatgcaacgtcaaagaactttctagaacaaacgataaccgtagccccatagtataacggttagggcgagcagcacttccagtaccagcacgccaatcgccagcgtcgaactagagaagctaaggccttcctctttgttgatattcaggaagctcggaataccaaggtaaagcaggtagccggtgtaaaacagcgccaccgtgccgaccagcgcacacaaccagaccagtggataaagcgccaccagaccgcttaaaaacagcggagttgcaacgtagcccgcgaagaccatgcagtgcgcaagtgacggacgctgcggataattacgcgccatccaccagatgacccgccccatcaccgcgaccccagccagcataacgccgtaaaacaagacagccagcgccagtccggtaaaccaggataacttcaggatagtgccatcgccaaaattccagccaatctgtgtagtgccaatgaaggcgcaaatcaccggaatcgccgccatcagcaaaacgtggtgggtgtaatggtgagaaatagtttcgttttcgcgattaatcacctgcatttcacgatcgggatgggaaaacagtccccagacatggctcataccgcccccttgttgtgagttcatgaacctgacagttcaagtataagtcagcttgtgattattttttgttcgcccatgtaattttcactgtctgatgaacgtcctttttcagcgtgaatgattcacagggtgtatgcttactggcaaccaaagggagacagactggcctatggatctcaatacacttatctcacaatatggttatgccgcgctggtgatcggtagcctggcggaaggtgaaaccgtgactttgctgggaggcgttgcggcgcatcaggggctattaaagttcccgctggtggtactttctgtggcgcttggcggcatgattggcgaccaggtgctctatctgtgcgggcggcggtttggcggcaagctgttacgccgtttctcgaaacatcaggataaaattgagcgggcgcagaaacttatccaacgccatccgtatctgtttgtcattggtacgcgctttatgtatggctttcgggtgattggcccgacgctgattggtgccagccagctgccgccgaaaatctttctgccgctgaatattctcggcgcatttgcctgggcgttgatttttaccactattggttacgctggtggtcaggtgattgcgccgtggttgcacaatctcgaccagcatttgaagcactgggtctggttgattctggtcgtggttctggtggtgggcgtgcgctggtggctgaaacgacgcgggaagaaaaagccggatcatcaggcgtaaaaccattgccctggataaggcgttcgcgccgcatccgacatccggagtaccatgcctgatacgacgcttgtgcgtcttttcatgccgaccaaaatattacccaatgaaatatccacgcacctcactgcgctattctgggttgaactgtggattcgccaacataaagccgccatccactatcaacgactgcccggtggtgtaatttgcgccctccgaacaaagccacaccaccaggctggcaatctcatgcgttgcgccaaaacgccgcaagggaatcgaaggctccgcgtcgggcttcacgtcgctgtcatccatgccattcattggcgtggcgatcgccccaggcgcgactgcgttcaccaaaatcttatgcctgaccagctccagcgccatcgctttggttaacccaccgagcgcatgtttagcggctgtgtaggcgctggcatccggcagcggcgtatgttcatgtaccgacgtaatgttgatgatgcgaccgccctgcccttgtttcaccatctgacgagccgcaatttgcgagcataagaatgcaccatcgacatcaacggtaaaaatcttgcgccactcatcaaaagccatatcaagaaacggcgctttggtcattgcacccgcattattcaccagcacatcaatgcgccccagccgttgaatgagtttctccagcgccagtgccccttctggtagattgccgagatccagctgcacgatctccgcacgtacgccgtggctaactacctcacgcgcggtatcttttgccccttcttcatctgagtgccaggtaataccaatatcaaacccctgctgcgccagtaataacgcgcactctttgccgatccccgaatcggaggcggtaataatcgcaacctgtgccatcgagttctccacttaacgctgaataaacgttaagtatagaaggcgcatatcatcagcgtttgtaacccccgcccaacgcaccagtgagttgaatggaggcatccagccactgcccttgcaataacaggccattggcccgctcacgcagcgcggggattctggcttcgctgacgcgggaaccagcaatgatgcccgcgttaaagcgcgcctgcgcaagacctaccacacgcaaggcatcgcgctcaatttgcgcctgatgctggtttttctccgccagtgtctgaacctgactggctgcccgcgccacgtcattcaccgcttcaaccaccgctttgttgtagctggcgatagacaagttgctttcggcttttgcgatatcgagattggcgttaagacgaccactatcgaaaatgggtagcgtcaggcctgccgtaacgcccatttgctgcgcggaatgacggaacagatcgcttaagtgcaacgcatcctgttgcaggaaggccatcaggttgatgtcaggataaaatgccgcttttgccgcatcaatggtgcttagcgatgactcaacgtaccagtgcgccgcctgcaaatctgcccgccgggccagtaaggagtaccccagttcatcaggaagctggcttgccactttcggcaacgcgaccggtttaagcttcaatgactttgtctggttatttgtaagtgcgcttaaccgtgcctcaataattttcattttccccgcgacatcgttgagctgctgccgggttttgctggcattaatatcggtttccacaccttcaactgaagaagtaatcccgttctgatatagctggcgatcggtcgcgataatggtgttctgctctttttctatttgctgcaagaccgtgtttaacgccgcctgggtttgccactcccagtacaggcgggctacgctgccagccagcaattggcgggtttgctcgcgttccgccgcccgtgctttaaccgtacccaggcgggcagtaacctccgcccgattctttccccagatatcgagatgccagcccgccgttaagccaaaagtaccgttggtgtaccacgggccggtcgtacctgcggccggatcgttcagagcaaacggccccattaagccttctgccgacattttttgccgctccatatccgccgaaaagtcgatctgcggaccatcctgagtggcaactgccttcgcctgggcttcagctagctgaatgcgctgttcagccacctgcatatccggtgcgttctgtagtgcattgttaattaaggaagtgagttgattatcgtgatactccagccaccattggctgtctggccaaccatttttcagcgccgtgggtaatgcggtgtcaacttgtgcagcgggcgtttgctggcttaacgcctggcgggtttcatgcataggcgcacacccggccagcatcagtaacagcggaaaacaggcgatggctggataaaaggaatcacgattcatgggggaataatcaggtaagaaaaggtgcgcggagattaccgtgtgttgcgatatattttttagtttcgcgtggcaatacatcagtggcaataaaacgacatatccagaaaaatatacactaagtgaatgatatcttccgatttatcttaatcgtttatggataacggcaaagggcttcgttttttcctatacttattcagcactcacaaataaaggaacgccaatgaaaattatactctgggctgtattgattattttcctgattgggctactggtggtgactggcgtatttaagatgatattttaaaattaattaatgtcatcaggtccgaaaataacgagaatatttcagtctctcatcctgttgcgctcctgtcatgtgcattgcttcatataatcactggcgcaaggagcgcgcagggggcggccaatcgccgccgccccctgcacccccgggctctggcgaacaaaatcgccgctgcgcggtgccctcggcttatcccttacggctaccgggtcgggcgcgaggtaacatccctgtaaaacgcgccctcagcccacatccatgtgggctgccccggccttcagggaacgcctcggcaattttgacgccaccaaacaaccgtgcggcctattgataaagagctaacacattgtcaaaaaacatcactatggttttttagagtttctcgatatcaattgcctgaatagcccttgcaatatcaggggaattattcaacacccgaacatgctgaaataattccgttgcttcatcgtattctttacgcaaataactcaaccactgtttaatccgcgcaacgtgatataacccggtatcgccctgcttttccagacgggtatatttttgcagcaaagcaaccacctccggccacggcattcgcggttcgttatattttaccacccggctcaggttgggaatattgagcgccccgcgaccaatcatcactgcgtcgcagccgctgatcgccatgcattgttgcgcgctctgccagtcccagatttcaccgttggcaatcaccggaatattcagccgctggcgaatatcgccaatcgcctgccagtcaatatgctccgcgcggtaaccctgctctttcgtccgcccatgcaccaccagctccgtagcgccagcctgttgaaccgcatcggcgatttcaaatttcttctcaccgctgtcccagcccagacgcactttcacgctgacgggcaaatgcgccggtacagcttcacgcatcgcttttgcaccctggtagatgagttcaggatctttgagtaacgtcgccccgccgccgctaccgttaaccgttttcgacgggcagccgcaattgagatccacgccccaggaacctaactccaccgcacgggcggcgttctctgccagccattgtgggaactgacctaacaactgcacgcgcaccagcgtaccagatggtgtccggctggcgttttgtagctcagggcaaatgcgatgaaagacttttaccggcagcagttgatccaccacgcggacaaactcggtgatgcacagatcgtagtcgttaacttcggtcagcaattcacgcaccagagagtcaagcactccctccatcggtgccagtaacacacgcatatcatcacccgcaaaaaaatgaggcgctatgttagcgcctatggtcagcggattaaaggtctgcaaagagggattgctgcaaactgcaatccctctctatgcttgatgtatgcctgagttcgctgcgcattgcgtaatgccggggagcgaaaaaataagcgctgatttcttaatgtgatcggtagcacgttttacgaattaattgtatgatgaatccatctcatctggggtgttgattatgagtaagacactgaacattatctggcaatatttacgcgctttcgtcctgatttatgcctgcctgtatgcaggcattttcattgcttccctgctaccggtaaccattccgggcagcatcatcgggatgctgatcctgtttgtcctgctggccttgcaaattcttccggcaaaatgggtcaatccggggtgctacgtactgattcgctatatggcgctattgtttgtgccgattggcgtaggcgtcatgcaatattttgatttgctccgcgcacagtttggcccggtagtggtttcctgtgcagtcagtacgctggtggtttttctggtggtgagctggagttcgcaactggtacacggtgaacgtaaagtcgtaggtcagaaaggatcagaagaatgatggcgaatatctggtggtcattaccgctgacattgattgtcttttttgccgcccgcaaactggcggcacggtataagtttcccttgcttaacccgttgctggtagcaatggtggtgatcattccttttttaatgctgactggcatctcttacgacagctactttaaaggtagcgaagtgctaaacgatctgctgcaaccggcggtcgtcgcgctggcctatcctttatatgagcagctacaccagatccgcgcgcgctggaaatcgatcatcaccatctgttttatcggcagcgtggttgcgatggtgacggggacttccgtggcattgttgatgggcgcttcaccggaaatcgccgcgtcaatcctgccgaaatcagtcaccacgcctattgcaatggcggttggcggcagtattggcggtattccggcaatcagcgcagtttgcgtgattttcgtcggcatcctcggcgcggtatttggccatacattgcttaatgcgatgcgtattcgtaccaaagctgcgcgcggtctggcaatggggactgcctcgcacgccctcggtacggcgcgctgcgccgagctggattatcaggaaggtgcatttagttcgctagcgctggtgttatgcgggataattacttcgctgatcgcaccgttccttttcccgattattctggcagtaatgggctaaaatttgcgatgcgtcgcgcatttttgatgtatgtttcacgcgttgcataattaatgagattcagatcacatataaagccacaacgggttcgtaaactgttatcccattacatgattatgaggcaacgccatgcatccacgttttcaaaccgcttttgcccaacttgcggataacttgcaatctgcactggaacctattctggcagacaagtacttccccgctttattgaccggggagcaagtctcatcgctgaagagcgcaacggggctggacgaagacgcgctggcattcgcactacttccgctggcggcggcctgtgcgcgtacgccattgtcgaattttaatgttggcgcaattgcgcgcggtgtgagcggaacctggtatttcggtgccaatatggaatttattggtgcgacaatgcagcaaaccgttcatgccgaacaaagcgcgatcagccacgcctggttgagtggtgaaaaagcgcttgcagccatcaccgttaactacacgccttgtggtcactgccgtcagtttatgaatgaactgaacagcggtctggatctgcgtattcatctgccgggccgcgaggcacacgcgctgcgtgactatctgccagatgcctttgggccgaaagatctggagattaaaacgctgctgatggacgaacaggatcacggctatgcgctgacgggtgatgcgctttctcaggcagcgattgcggcggcaaaccgttcgcacatgccttacagtaagtcgccaagcggtgtcgcgctggaatgtaaagacggtcgtattttcagtggcagctacgctgaaaacgccgcattcaacccgactctgccaccgttgcagggagcgttaattctgttgaatctcaagggttatgattacccggatatccagcgcgcggttctggcagaaaaagccgatgcgccgttgattcagtgggatgccacctccgcaacgctgaaagctctcggctgtcacagtatcgaccgagtgcttctcgcttaagcctggtgccggatgcggcgtgaacgccttgtccggcttgccagccctctcctggtgtcgaaattcccggcaaacagtttgccgtttcttgcgcaaaaccagcgggtaaagtagcctgatggaaattttccttagatcgagtctcctgcatgttaaagcgcgtgttcctcagcctgttagtcctgatcggcttgctgctgttgactgtgctcggcctcgatcgctggatgagctggaaaaccgcgccttatatctacgacgaattgcaggatctcccctaccgccaggtcggtgtggtgctcggaacagcaaaatattatcgtactggcgtaattaatcagtattatcgctaccgcattcaaggagcgattaatgcctataacagcggtaaggtaaattatctattactgagcggcgataacgcattgcaaagttataatgagccgatgaccatgcgcaaagatttaatcgctgctggtgtcgacccatcagatattgttctcgattacgcaggctttcgtacgctggattccatcgtgcgtacacgcaaagttttcgatactaatgatttcattattatcacccaacgtttccactgtgagcgagcattatttattgcgctgcatatggggattcaggctcagtgttatgccgtaccgtcaccgaaagatatgctgtcagtacgtattcgtgaatttgccgcccgtttcggtgcgctggctgacctttatatttttaaacgtgaaccgcgttttttagggccgctggtccctattccggctatgcaccaggtaccggaagatgcgcaggggtatcccgccgtcacacccgaacagttacttgaattacaaaagaaacaaggaaagtagttatggatgtacagcagttttttgtcgttgccgtttttttccttatcccgatattttgtttccgcgaagcatggaaaggctggcgcgcaggcgcgattgataaacgggttaaaaatgcaccggaaccggtgtatgtctggcgagcaaaaaatcccggactctttttcgcttatatggtggcatatatcggcttcggaattttatctatcggcatgattgtttatcttattttctatcgttaatattcccctctccagttaattattgagaataattattacttcacctgataagctgcggatatcacattcctaaccgcagctatttgtgaatcttttcacagtttaaattcccccgcacgcttagccttaatatcagtacattattatttactaaacgctcgccttaattacctatagcattaaggaagatcacatgccgcaacaaaattatctggatgaactcactccggcttttacgtctttactggcgattaaagaagcctctcgctgtttattatgtcacgaagctccctgtagtcaggcttgcccggcacagaccgatccggggaaatttattcgctcaatctactttcgtaattttaaaggcgctgccgagacaattcgcgaaaataatgccctcggtgccgtttgtgccagagtgtgcccgacggagaaattatgccaaagcggttgtacccgtgccggtgttgatgctcccattgatatcggccgcttacagcgttttgttactgattttgaacaacaaaccggaatggaaatttatcagcccggtactaaaacgctcggcaaagtcgcgattattggcgcaggtcctgccggattgcaggccagtgtgacactgacaaaccagggttatgacgtcacgatttatgagaaagaagcgcaccccggtggctggttgcgtaacggtattccgcaattccggttaccgcaatcagtgctggatgcagagatcgcccgtattgaaaaaatgggcgtgaccattaagtgcaacaacgaagtcggtaacacactcacccttgagcagctgaaagcagaaaaccgcgcggtactggtcaccgtggggttatcaagcggttccgggctaccgctgtttgagcatagtgacgttgagattgccgtcgacttcttgcaacgtgcacgacaggcgcaaggcgatatcagcattccacaaagcgcattaattatcggcggcggtgatgtcgcgatggacgtagccagcacgctgaaagttctcggctgtcaggcggtaacttgcgtagcgcgtgaagagttagatgagtttccggcaagcgaaaaagagtttaccagcgcccgggagctgggcgtttcgatcatcgatggattcacgccagtagccgtggaaggcaataaagtcacgtttaagcatgtacggttatcgggcgaactgacgatggcggcagataaaattattctcgccgtcggtcagcatgccagactagatgcctttgcggagttagagccgcagcgtaacaccatcaaaacacaaaattaccagacccgcgacccgcaagtctttgctgctggcgatattgttgagggtgacaaaaccgtggtctatgccgtgaaaaccgggaaagaagccgccgaggcgattcatcactatttagagggagcttgctcatgttaacgaaagatctttcgattactttttgcggcgtgaagtttcccaacccgttctgcctctcttcttcgccggtaggcaactgctatgagatgtgtgccaaagcctacgacacaggttggggcggtgtggtgtttaaaacgatcggcttttttatcgccaacgaagtctcgccgcgttttgatcatctggtgaaagaagataccggttttatcggcttcaaaaatatggagcagattgctgaacatccgttggaagagaatctggccgccctgcgtcggctgaaggaagattacccggacaaagtattgatcgcttcgatcatgggggaaaatgagcagcaatgggaggagctggcgcgcctggtgcaagaagctggcgcggatatgatcgagtgtaacttctcctgtccgcaaatgacttctcatgcgatgggtagcgatgtcgggcaaagcccggagctggtagaaaaatattgtcgggcagtgaaacggggttccacgctgccaatgctggcgaagatgacgccgaatatcggtgatatgtgcgaagtggcgctggcggcgaagcgcggcggcgcagatggcattgcggcgattaacaccgttaaatccatcaccaatatcgatcttaatcagaaaatcggtatgccgatcgttaacggaaaatcgagtatttccggatattccggtaaagcggtaaaaccgatcgccctgcgcttcattcagcaaatgcgcacccatccagaactgcgcgatttcccaatcagcggtatcggcggcattgaaacctgggaggatgcggctgagtttttattgctcggcgcagcaacgttacaggtgaccaccggcatcatgcagtacgggtatcggatagtggaagatatggcaagcgggttgtcgcattatctcgccgatcagggatttgattcgctgcaggagatggtaggtctggcgaataacaatattgtcccggcggaagatttagaccgcagttatattgtctatccccgtatcaatcttgataaatgtgttggctgtggacgctgttatatttcctgttacgacggcggtcaccaggcgatggaatggagcgagaaaacccgcacaccgcattgtaataccgagaaatgtgtgggttgtctgctttgtggtcacgtctgcccggtgggttgtattgagctcggggaagtgaagtttaagaaaggcgagaaagaacacccggtaacgttgtaaaaccagagacgcatccggcatttggttcctgtcgccggatgcggcttgaacgccttatccggcctacaaaaccatacaaatcagtatgttgagcttattgtaggccggataaaacgcgccagcgttgcatccggcatttggctcctgttgccggatgcggcgtgaacgccttatccggcctacaaaaccacacagatcatgatgttatgtgcgtttatgaccgaatgcggaccacattcacatcatttcttacgcgcgtatttcagtgaatccagcgctacggcgaagataataatcgcccctttgatgatgtactgccagtatgggtttacgccgatatacgtcaggccatagttgatgacggtaaaaataattaccccggtcaccacgccaatcaccgtccccacaccgccgctgaacgatacaccgcctaccacgcacgccgcgatagcatccagctcatacataaagccgaggttgttggtggcagagccgatacgtccggcttctaacatcccgccaaaggcatagaacacgccagacaacgcgtagatcatcagcaggttcaggccgacgttgacaccagatacttttgccgcttccgggttaccgccaatggcaaaaatgttcttaccgaagcgggttttgttccacaacacccagacgaacgccaccgcaatcaacgcgtagaaggtgatgtaagagagacggaaactccccagcgcgacaaagccctgagcaaaggtagagaagccactgtcaaaaccagaaattggcgacgccccgacaaagtcgtaatagagcgagttgatgccatagacgatgatcatcgtgccgagcgtggtaatgaacggcgtcacgttgagataagcgataatcagaccgttgatcaaaccgatcaccgcaccaatggcacagacaatcagaataaccagcgcaatcggcatcgtcgccatttccgggaacactttgttggcgttatccatggactgcaataatgtcgcagccaccactgccgccagccctacctgacgaccagcagaaagatcggtcccctgggtgacaattaaccctgccacaccgagcgcgataataatacgcaccgatgactgggtgagaatattacttaagttcaacagacttaaaaatgttgggtcctggaaaataataatcgccagcaaaactaaaagaacgacgtaaataccgccctctttcaggtaagtaagaaaacttttcttatttaacgcactcatgggaagcccctaatcttaaaggtgcaaagacgcaagacgcagaatttcgttttgcgttgttgtttttgtatcgacaattccggaaacgagaccattgctcatgaccagaatacggtctgttatccctaacaactcaggcatttcagaggagataataataatccccttgcctttcttcgccagttcggcaattaactgataaatttcaaacttcgccccgacatcaataccgcgcgtcggttcatcgagcattaatatttctggttgcgttagtagccagcgaccaataatcaccttttgctgattaccaccggagagcgaaccaatttgcgtccgatgacccggcgtttttacccgcatcgaatcaatcacccactgggtatcgcttttcatccgcgagttatccagtaaaccaactttatttttgtagttgcgaatattggaaattaacgagttaaaaccaatatccagataggcataaattcccgttgagcggcgctcctcagttaccagtgcaaatccatggtttatggcttcgttggcattatggttattgatctgtttgccgtgcaacgttatggtgccagccgatttctcgcgaataccaaataacgtctcaacaatatcggtacgtttcgcccccaccagaccggcaataccgaggatctcccctttatgcagatcaaacgagacatcgcgaatcgacggctggcgcagtgacgtcaggttacgtacctcgaggatgacttcgcccggtttgttttctttgtcagggaaacgctggttaagagaacgcccaaccatcatggcgatgatcttgtccatcgtcagtcctgccagcggttcggtggcgatccactgaccgtcgcgcaatacggtaacttcatcacataactggaagatttcttccattttatgcgagatataaacaataccgcagccgcgctcttttaatttacgaataatagtgaacagatgattgacctctttttcggttaacgaagaagtcggttcatccataatcacaattttcgcgttataggaaaacgctttggcgatttcgatcatctgcatttgcgaaacggataatgtgccgacgcgcgcacgcggatcgatatcaatatccagttcgtcaaaaatcgctttggtttcgcggtacattttgtcctgatcgacaaacatgcctttggtgggatatcgccccagccacatgttatccatcaccgaacgttgtaataccaggtttaactcctggtgtaccatcgaaataccattttccagggcttcttttgcagaatggaaatcgatctctttaccctggaataaaatggtgccggagtctttttgataaataccaaacaggcattttaataatgtcgattttcctgcaccgttttcccccattaatgcatggatagaatgtggccggacttttaaattaacgttatcaagtgccttaacaccaggaaaggacttgttgataccgctcatttccaacaagtattccccggaggacggagtcgttgagctgaccatataattttaccttgttggccatacaataagggcgcagtaatagactgcgcccaatcagtcttatttcttgctgaattcagccaggttgtctttatctacgccaacataaggtacgcggaccactttgttgtcgattttccagttggtgccatcagccgcacctttaccatcggccaggtttttcgccagatcaaaggtcgctttcgcctggttgttagcatcgttcagtacggtgcccgccagtgcaccggatttcaccagcgccagcgcttctggcagcgcatcgacgccaaacaccggaatgctggacttgttgtgtgctttcagcgcttcaaccgcgcccattgccatcgcatcgttgttggcgataaccacttcgattttgttggcgttcgggccagacagccaggcgtccatcttatctttcgcctgagcggtgtcccacattgcggtatctaactgtaactgttcagttttgatgcctttatcgttcaattctttaatcacgtaagtggtacgtgcttctgcatccggatggcccggttcacctttcagcagtacgaactgaatctgaccgtctttgttcagatcccaaccctgattcgccgcccagtgtttagcaatcaaatcgccttgaataatgccggactctttggagtcagtgccaacgtagtaggctttgtcgtagctatccagcgccttacgagacggttctttgttgaagaaaaccaccggcacgttttgcccacgcgctttctcaatcaccgtacccgcagctgccgggtcaaccaggttgattgccagtgccttcacccctttcgccagcaatacgtcgatctgatcgttctgcttggactggtcattctgagaatcattcatcagcagctgaacatctggcgcggctttcgcatcttgctcaatagccttgcgcactacagacataaagttatcgtcgtacttatagattgttacaccaatgcgagtatcagcagcgtgtgcagcggcaccgaataacatgctggccatcacagcagacagggttaacaccttcttattcatggtatctccggtttttcttatgcagggtagtgcttgagataaatgctcggcggggcagtagagttaatgaagtgttactgaacgccgaagctcactttttaaaattcgttcttccatgcccggtaacgctccagaaaacggctttaattgttgttatgacgctgttacctcggcaaaagtgattattcactgttacatacgggttacaacgttaaaacggtgcaatcatagctatcacattgttaagatactgtgaaatcactcacagattgaaagcggttacatcgcctgatttgttgagttagtgatcgccgccgcattctggcgtgttgcgacagaatggcgacgcactaccgtcggcataaaacagtggctggcacgaggatcaatattgcctgctgccccctgcaaggccagttcggtggctaatttcgccattgaagcaatgggataacgcacggtcgttaattgcgggtcggtgtaacgggcgatgggaatatcatcgaaaccgatgattgagagatgtaacggaatcgcaatgccattatcttttaatgctgtcagtgcgccagcggccatattgtcgttataagcaaatacagcggtaagttgtagattgcgccccagcagttcaaccatcgccgcctcaccgcccggcatgtccggcgtaccagcgccaatccagctttccggcggaataatatcctgctctttcaacgcactcatccagcctgctttacgcatggcgtcatcttcaatgccgtggctggaagaaagataaccaatacgttgatgaccgttattcagcaacatgcgcgtcgccattcgggcaccgctgagattatccaggcaaacgcaacgatgggcgtaccccggcacaacgcggttgattaacaccataccgggaatgttatccataaattgcgccagttcatcgtcactcaatgcttttgagtgaacaatcaacgcattacaacgctggcgaattaacacctcaatggcgtgacgctctttttccgcttcatgatagctattgccgattagcacgtatttctgatgctgctgagcgaccagatccaccgcttttaccagcgcgccgaaaaacgcatcagaaacgtccatcaccaccacgccaatggtgtcgctaacctgagttgccagcgcctgggcattggcgtttggccgataatccagctcactcacggctttcattactgcttcacgcgtgtcggcactgaccagcgtgctgttattgagcacccgggaaaccgttgccacagagacgccagcctgacgcgctacatcacgaatggtgatcatattcactacctgttatgagattgcagtaaatgactgcttgctggcggctattttgtcagcactgaatacaggacttcgtgaatcgagtcacagcaatggaaacggttacagccgttttgttaacgaatgtgatccagatcgttatcttgatgttttagatattgccggtccggcagcacgcaaagttaactgacgccagagccattccaccggcccctggcggaagtaacgcagccagataacagagaagaggatattcgccagccataccggaataacaaacgccagcagctccaggcggtcaaaatgcataaacaaaccgaggtggtaaaaaagcgtggtacaaatcagcgtttgcaatagatagttggtcagcgccatccgtccgacgcaggcgatcgcaagcaccagcttaaagcggctcaattgcggccagaagccataaaacagcgacgcatagccaatcgcctgaaacggcgcactcagttcccgcggcatttgaagtaagaaggcacaccagcgatacgcccagtccagctgccattgcagggcgatggcaggaaggttaatggtcaccccaatcgccaccagcacaaaaccagtacgacgatagtgacgtaagctgaactgccctttcagccagccgctgcgcatcagcgccgcaccaatgagcatcatccctgccagttgccagccatactgtgcgcccagtgccagtaaactgttgccaacaccatcggcacgattactgatcgcttcaacgccgccgtgaagcttccagtatttttcatacaaaatagccgatgcatccggcgtccaggcgcggctggtctggctgtcggaaatcagccccaataacagcaaaacgccaagccccaccagataaagcatgacgcctgtattaaacaggctttttaccgatggcgcatcgcgcaccagccgccagcagattaagcccaccagcccgtaagccagcaaaatatcgccgtcccagaacaataaaccgtgaataaagcccaacaagactaacagcgttaaccgcgactggatccagcgtctgccacggggcagcaacatttgcaggcccgcaccaaacagtagcgcaaaaagcgtgaggaatttcacctggccgatgagatcaagaaatgcccaagtccatgcatcccgcggcgtaatagcaccgtaccaggcgggattgagataagccgcctttggtagcccaaaggcgctgatgtttaatagcaggatccccagaatggcgacgccgcgaacaaaatcgagcgtgacgttgcgctccatggttcctgccttttaatcagttgtgatgacgcacagcgcgcagaaactcgtggcgcgtattctgactggatttgaacaatccaccaagagaggtcgttgtcgtggcactggttgcatcgcggatgccacgcgccttcacgcagtaatgcaccgcgtcgatcgagacagccacgttattggtgcccagcagcgtttgtagcgcaataagaatttgctgcgtcagacgttcctgcacctgcggacgctgggcaaagaactgcacaatgcggttaatttttgacagaccgatcaccgaatctttcgggatataggccaccgtcgctttgccatcgatggtaacaaaatggtgttcacaggtgctggtcagagtgatatcgcgcacggtgaccatttcatcgaccttcattttgttttcaatgagggtgattttcgggaaattggcgtaatccagaccggagaaaatttcatcgacatacattttagcgatgcgatgcggcgtttccatcaaactgtcatcagccaggtcgagattcagcagctgcatgatttcggtcatatgaccagcaataaggcttttgcgcgtttcgttatccatttcatgcacgggcgggcgcagcggtgtttccagtcctcgcgcaactaacgcttcatgaaccagggccgcttctttactgagtgatggcatttatgatttctcctgcaggtgtgacgcctccgccctgcgtgggggcaaagttattaagctgatttacagcctgattattgtgcgtgaggcggcgcacataatccagtattcacagcgataattattgtaattgccgctgcctttcatcagcagatgttaaaacatcgttatgcaaatacggaagtgaaagttactcacagcacattgaataaacggtatgatgaagaaattgcaaacaacacaacaaggagccacgcatggaaatgctcgaagagcaccgctgttttgaaggctggcagcaacgctggcgacacgactccagtaccttaaactgcccgatgacgttcagtatctttctccctccacctcgtgatcacactccgccaccagtgctgtactggctttccggattaacctgcaatgacgagaacttcaccaccaaggcgggtgcccagcgggtagcggcggaactggggattgtactggtgatgccagacaccagcccgcgcggcgaaaaggttgccaacgacgatggctacgatttaggccagggcgcaggcttttatcttaatgccacgcaaccgccgtgggcgacgcattaccggatgtatgattatctgcgcgatgaattaccggcgctggttcagtcgcaatttaatgtcagcgaccgctgcgccattagcggtcactcaatgggtggtcacggtgcgctgattatggcgctgaaaaatccgggtaaatacaccagcgtttcggcctttgcgccaattgtgaatccgtgcagcgtcccgtggggaatcaaagcgtttagcagctatttaggtgaggacaaaaatgcatggctggaatgggacagttgcgcactgatgtatgccagtaacgcgcaggatgcgatcccgacgcttatcgatcagggcgataatgatcagtttcttgccgaccagttgcaacctgcggtactggcagaagccgcgcgccagaaagcgtggccgatgacgctgcgtattcagccgggatatgatcacagttactacttcatcgcctcttttatagaggatcacctgcgcttccatgcgcagtatttactgaagtgaaagtccgcccggttcgccgggcatcttctcatcagaagcgataatccactgccataaagtaacgacgtccgtcttcgttatagctgtagtcgtcacgactgagatccttgtcgccaaggttcagcacgcctgcgcgcagtttgacgtctttagtcacctgccaggccgcgccggtattccagatggtataaccgcccggtgttttagccgtcgtgctgtcggcgcgtttctgcccggtatagtgcccagaaacatagaatgaccagtcttccagcgccagcggtttccagtccagcgtaccgttagcagtatggaacggcagatcggatagcggtttgttttcgccgttgctgacatcacgaccatcgttgtaggtgtagttgatcgacagtttccattcatcgttgaacggaattttcagttcggtttccacgccctgaatacgagctttgttaacgttgtagtagctaaataccggtatgcgccgtccgttagcgcccgtctcaaaaccaacaaagttttggtagcccggtgcagcgttgacgtcagacgtacggctgatgctgatacgatctttcacatcgttacggaaaacggtaacgctggattcaaccccttccagccagccttcttcacccatgtagtaaagccccagctcccaactttcgctggtttctggtttcagatccgggctacccacaatcttacatgcgccacggcaggaattgctcgtccagtcagggctaagttgcaacagagaaggtgctttaaatgccgtcgcccagccccctttcaccgttacggtgtcggtggcgttataaaccaggtaggcacgcggactccagtgttcaccgtaggtttcgtgatcgtccatacgcacgccggtcgtcagcgccagcggctcgaagatccgccattcatcttccacaaacagcgcgtactggctggcagacgttttggagctggttcccccggtcaggttcaccgcatcgctaagtttgtcgtgacgccattcaccgccaaccgtgagaaactgattaatcgccgtcagcggcaacgtgtatttgccgtcgaccgtattgctttcggaagttatcgggctgctgttgccagggtttttgttctcgactttctcaccgtagtatttcagttcgctggtgccgtaatcccaacgcccattatggctgacggagtagttctggcgttccaggcggtttttgtccagcgagtcggaatcacgatcctgacggtcgaaaccgtatccggcagtaaaatcgtgattttgattcggtgtccaggcaaattcgacattgccgtcgcggctggagaatccttcaatacgcggcgtttctccggtatcggtggtcgttgagttttgcgggtcatccttttcacgttttgccaggctgccgtaagctttcattcccagcacaccatcaattaatggtccactggtaaagaactgaccgttataggtgtcaccgcgatcgcgatgttcctgaatggtggtatcgacggtaacggtacccgaccatttctgaccgatttttttggtgatgatattcactacaccgccgagcgcatcggaaccgtacagcgacgacatcgggccacggaccacttcaatacgttcgatggaatcgaccgggatccagttcagatcgaaatcattgtggcggaagacggcattgcgggagttcacgcgtttaccgtcgacgagaatcagggtatagctgctgtccagaccacgaatactaacgcccttacggttatccccttcgttcgtcagttgtacgccaggcacttctttgaggacatccttcagattctgtaccggttttcgctgcaggtcttcctgggtaatgacgctgatactggcaggtgcatctttaagattttgttccacggaagatgcagtgacaaccatcgtttcgccatcatcatcgaccgctaacacaggccatgcacaagaaatagcggacaaacacagcccgacccgtacgaaagggttcaacctaaacattccatatctccatgaggtaactacgaaaataaaatgggttatcgctcacatcttcttcacgtccccttgcgtacggcagcatcgcggtggacttattttttatgcaggtgatcatcccagaaagccggaacagcctctgatttgtcagccttttttgattgcggcgtaacgataatgcaaacgataacaattatcaatccaaatgttaaattttatatccgcatgatttgtcagggaaatggaattgaaaaagccctctcggttgagagggcttagcaaggaagggaggaaacttatttcttatcgttctgcgggaacttcatttcgctgtagcgtacgaagtgagttcctttaatcagcttgtagccgaaccaaataatcaggaacagcgggataccaatatacgttgccgctacgccgccccagtcaatagtatctttcaggaacgcttcgtagttctggcccaaagtgataatcagacacagaatgaatgcgaagatcggccccagtgggaagaaacctgaacggtacggcagatcgttaatgtcgtgtccctgcaatacgtaaccgcgacggaagcgatagtggctaatggcaatccccagccaggcgataaaacccgtcatcccggaggtgttcagcagccacaggtataccgtctggttgccaaacatggaggtcaggaagcacagaccggcaatcaccgtcgtcgcatacagcgcattacgcggcacgccaccacgcgacagtttagcgaaaatgcgcggcgctttaccgtcacacgccagggtgtacagcatacgagtagacgcatacataccggagttacccgctgacagcaccgccgtcagaataactgcgttcatcaccgccgccgcagagagcagacccgcgtgctggaacaccagggtgaacggactaacgctgatgtctttaacatcgttacgcagcaggctcggatcggtgtacggaataatcaggctgataatcaggatcgcgaacacatagaacaacaggattcgccagaacacctgacgtaccgcgcgtggaatgtttttcgccggatcttcggactcgcctgcagcaataccgatcagctcggttccctggaaagagaagccgacaatcatagctacgccgatcatcgccgcaaaaccaccagcaaacggcgcttcgccgattgtccagttgctccagcccgcaggctgcgcgcctttgaagataccgataatcatcagcacgccaacgatgataaagacaataactgtcgtgactttgatcagtgagaaccagtattccgcttcaccaaagccacgaactgagatgtagttcagcaggaagataacgccgaggaacaacgcactccagatccagcccggtgtatccgggaaccaccagctcatgaccagctgagctgcaaccaggtcaacggcgatagtcaccgcccagttgtaccagtagttccagcccagcgcgaagccaaagccttcttcaacatagttctgaccgtaagtggcaaacgaaccggaaaccggcatatatgcagccagttcaccgagactggtcatcaggaagtaaaccatcaggccaatcagcatatacgagagcaatgccccgcccggacctgcctgagaaatcgttgcgccagaggcaacaaaaagacctgtaccgatggaaccgccaatggcaatcatcgtcaggtgacgcgcctttaattcacggcgtaagcccggcgcttctgtggttttagtttcggaaaccatacaaaaatgctatccatcttaaaaatgaggcgcgattgtagcagacgattggcaatccttccggcagaaatacacagttataagacaccttcatgatcgcccagggattataagtaaagcagccaatctcttttctggcgaatgcatgctgaaggcgctgcgtcacgaaatcgacacagcaccagcatgttcttgtacagcaacttaacgcggcacatttgcgggatcgcaatagtccagaaagcgccgtagcgcgttggaaaggtgtttttgccgatgatgtatacgccacaacgtacgcatcaggcgcggcagagggaccgcaacttcacttaatgtgcctgcctgcaattgatcttcaatcacacgtcgcgacaggcaactaattcccaacccatgacgcaccgcatgtttgattgcctcggagttacctaattccatcgccatctcaaacttcggtaaatgtgacagcaacagataatcgacaatctcccgcgtgccggaaccgcgttcacgcaggatccacggcgcagcggccagctgttctaaggtgaccggaccacgggccaacggcgaagtcggcgcggcgaaaaccaccagctcgtcttccagccacggttcagaaatgatttcagtgctgtggcacggtccttcaataaagccaatatcaacgcggaaatccagcaccgcttgcatcacgtcctggctattcccaacgctaagttcaatcggcaactgcggataatcatggcgataacgggcgataactgcaggcagaatgtagttaccgatggtactactggcatagatacgaatcgcgccgttgtcttcgcgaaacagttgttcgatttcaaccgcctgttcaagcaatgccaacgcacgcggatagagcagccgcccgtgttcattaacaaccagtcttttccccacgcgatcaaacagttgcacgccaagctgcccttccaggtcggtcaaggctgcgctcactgctgattgcgacaacgccagcatcaccgacgcctgggtggttgatccacttttcaatacttctgcaaaaacttccaactgccggagggtgatgtgcatagtcgcttaccacttataaagattaattataaatatataatcaattttatttttaaaccagttagtcgtaaccttatgcccggttaaaggagagggttatgacgaatatcaccttacagaaacaacatcgtacactgtggcattttattccggggttagccctgagtgcagttatcaccggggtcgccctgtggggtggttccattcccgcggttgcgggtgccgggtttagtgccctcaccctcgcaatcttgttggggatggttttaggcaacaccatctatccgcacatctggaaaagctgtgacggtggtgtgctgtttgccaagcaatatttattacgtctgggtatcattctttatggcttccgtctgacgttctcgcaaattgccgatgtcggtatcagtgggatcatcattgacgtgttgacgctgtccagtaccttcctgctggcttgcttcctggggcagaaagtgtttggtctggataagcacaccagctggttgatcggtgccggtagcagtatctgtggtgctgccgcggtactggcgactgagccggtagtgaaagcggaagccagtaaagtaaccgtggctgttgcaaccgttgttatcttcgggaccgtcgcgattttcctctacccggcgatatatccgctgatgtctcaatggtttagtccggaaactttcggtatctacattggttctactgtgcacgaagtggcgcaggtggtggcggcaggtcatgccatcagcccggatgcggaaaacgcagcagttatttccaaaatgctgcgcgtgatgatgctggctccgttcctcatcctgctggcggcgcgtgttaaacagctgtctggggcgaacagcggcgagaaaagcaaaatcactattccgtggtttgccatcttgttcatcgtagttgccatctttaactcgttccacctgttaccgcagagcgtggtgaacatgctggtaacgctggataccttcctgctggcaatggcgatggcggcgctgggtctgaccactcacgtcagcgcgctgaaaaaagctggggcgaaacctctgctgatggcactggtactgtttgcctggctgattgttggtggtggtgcgattaactatgtgattcaaagcgtcatcgcataaaccactacatcttgctcctgttaacccgctatcattaccgttttcctccagcgggtttaacaggagtcctcgcatgaaatacattggagcgcacgttagtgctgctggcggtctggcaaatgccgcaattcgcgccgccgaaatcgacgcaaccgcgtttgccttgttcaccaaaaaccaacgtcagtggcgtgccgcaccgctcacgacgcaaaccatcgatgaattcaaagccgcctgtgaaaaatatcactacacatcggcgcaaattcttccccacgacagttatctgattaacctcggacatccggtcactgaagctctggaaaaatcgcgcgatgcctttatagatgaaatgcagcgttgcgaacagctggggctttctttgctcaacttccaccctggcagccatctgatgcagatttcagaagaggattgccttgcgcgtattgccgaatccatcaacattgcgctggataaaactcaaggtgtgacagcggtgatagaaaacaccgccggtcagggcagtaacttagggtttaaattcgaacatctcgcggcgattatcgacggcgtggaagataaatcccgcgtcggcgtctgcattgatacctgccatgctttcgctgccgggtatgatttgcgtactccagccgaatgcgagaaaacattcgcggattttgcccgtactgtcggctttaagtatctgcgcgggatgcaccttaacgatgcgaaaagcacctttggcagccgcgttgaccgccatcatagcctcggtgaaggcaatatcggtcatgatgcgttccgctggatcatgcaggacgaccgtttcgacggcattccgctgatcctcgaaaccatcaacccggatatctgggcagaagagatcgcctggctgaaagcgcaacaaactgaaaaagcggtagcctgaagatgaataaccgggaaaaggagatccttgcaattttacggcgtaacccgctgattcagcagaacgaaattgcggacatgctgcaaatcagccgttcgcgcgttgcggcgcatattatggatttaatgcacaaaggccggattaaaggcaaaggttacattctcaccgagcaggaatactgcgtagtggtggggacaatcaatatggatattcgcgggatggcggatatccgttacccgcaatcggcttctcatcccggtacaattcattgctcagcgggcggcgtgggacgcaacatcgcccacaatctggcgctgttaggccgtgacgtccatttgctttcagtgattggcgatgacttttatggcgaaatgctcctggaagaaacgcgccgtgccggcgtgaatgtctccggctgcgttcgtttgcatggtcaaagcacatcgacgtatctggcaattgccaatcgagacgatcaaaccgtgctggcgattaacgatacccatctgctggaacagttgacaccgcaactactgaacgggtcgcgcgatttacttcgtcatgcgggcgtggtactggctgattgcaacctgacagccgaggcgctggaatgggtctttaccctcgctgatgaaatcccggtgtttgtcgataccgtttcagaattcaaagcgggcaaaatcaaacactggctggcgcatattcacaccctgaaacccactttaccggagctggaaattttatggggacaggcgatcaccagcgatgctgaccgtaataccgcagtgaatgcattgcatcagcaaggtgttcagcaactgtttgtttatttgcccgatgagtcagtttattgcagcgaaaaggatggagaacaatttttgctgaccgcgccagcgcatacgacagtagacagttttggtgctgacgatggttttatggcgggcctggtatatagctttcttgaaggatacagtttccgcgacagcgcccgttttgcggtagcctgcgcggcaatttcgcgcgccagcggcagcttaaacaaccctaccctgtctgccgataacgcgctttcattagtgccaatggtgtaacaatgttgccggatgcgacgcttaacgcgtcttatccggcctacaaatcaggcaatttcagcaagtaaatgtaggcctgataagcttgcgcatcaggcaatgacactcaagctaaaccaataaagaacccggcaatggtcgcactcatcaagttggaaagcgtcgccgccgccagcgcccgtaaaccaagctgggcgatttccggcgcacggtgtggcgcaaccgcagaaaacgcccccaccaccaccccgatagaaccaaagttagcgaaaccgcacaacgcgaaggaaataatcgccacagttttagcatcgagagtgccagccgtttgcagatagggtgagaaattgagataagcgacaaattcatttattgccagtttctgtccaatcaaactcccggcaagattcgcatcactccagtccacacccatcacccacgccagtggagccagcaggtaacctaaaatggactccagcgaggcatgttcaaaaccaaaccagccaccaacgccgccgataataccgttaatcaacgcaattattgcaacaaatgccatcaccactgttgccacacctgcggcgattttcagcccggtcattgcccctgtcgcagcggcttcaataatgctttttggcggtgtttcggtgaaagagaggttattaaaggaaacctgcgaagattccgttgccgggcttaacaggcgggcaaacaagatcccgccagggatcgccattaatgatgccgccagcagatattccacaggcacgcccagtgcggcgtaaccaatcattgtcgaaccagcaatcgaggccatgccactacaaatcgctgtaaataattcattgcgattcagacgatcgataaagggtttgacgattgccggaatttcgttttgcccgaggaaaatggtggtgaccgcgacgaatgactcgatcttgctgatatttaatgctttctggaagataccgccgagaattcgaattaaaatccccatcacaccgatgtagtagagaatactcaccagcgcggtgacgaagataattgccggtaacaccctgaaaccaaagataaatcctgcaccatcaaataaggtatccattttcggtccgaccagagaaccgaagataaatgcgctacccgcgtcgctgtacgccatcactttatgcacgccaaaagcgactttttcagcgacccaacgccctggcggtaaccaaagcataatgccgccaatcacgacctgtaacactaacgccgcgccaacggtacgcaggctgatcttcttcttgtttactgacagtaaaaacgcaatcgtcagcaataccaccattcccagaacacttctcatgacatccatagtgattatctcttcatgtcatattgggcgacggctttctgcccatcagaaatagccaggcctgcatcttgcgataccggcccggcttgttatcaacacttaatgggttttgatgtagccgcgcacgcactcttcgactaatccccagaaccagtctgtatcaatagtgatgccgactttggtattggcgggcttgccaagaacgcccagctcgtcgcagacggtacgcccatagcaagggccactgttgacgtccacttcgacgtacatctcctgggttttaatgccatcagggttaatcagataaccgatgcaggtggcgtcgtgcaccgggccgccagcaaggccgtagttttcgaactgcgttttgagagtgaagttcatgatgtcgctgaacagctctccggcggggccgcctgccctttccatccgagcaatcacgtccggggtgcaaacggtctggttggtgagatcgaggcccatcatcactaatggaacgccggaggtgaacactacgcgtgcggcttccgggtcggcaaagatgttgaactcggcagatggcgtgaagttgcctgtaccgtaagcgccgcccattagcacaatttcacggattttgggcaggatcgcgggttgcatacgcattgccaccgcgatatttgaaagcggaccaaccggcaccagagtgatatcgccatcgcttgccatcagggtatcaatgatatatttcaccgcatgagtgctttctgcctggcgggtcagcggctcgaataccgggccatccagtccggtttcaccgtgaatattatcggcaacgatttgttgacgcataatgggctgcggcatccccgcataaaccggaacattaatctccagtttctggcaaacattcaggccattaattaatgttttatcaagcgtctgattacccgctacaatagtgatgcctaataaatctattgccggatgtttcgccgccatcattatagcaatagcatcatcatgacccggatcacaatccagaataatttttctcttttccattgtttatttcctctgtttccagttgcgttattttttctacagcaaagaaaattcgaccgggccgatgattgaatcttaacaacagcgtacgtatgctaaatatgagaaatctcatagcggataaacatcgtgaaagaaatccacaataatgatcttaagcagcaattgatgagtgaatccgcgtttaaggattgctttttaacggatgtttcagccgatacgcggctgtttcattttttagcgcgtgactacattgtgcaggaagggcaacagccgtcctggctgttttacctgacgcgaggccgcgccaggctttacgccacgctagctaatggtcgcgtgtcgctgatcgatttctttgccgccccctgttttattggcgagattgagttaatcgataaagaccatgaaccgcgtgcggtgcaggctattgaagagtgttggtgccttgcgctccctatgaaacattaccgtccgctgttattaaacgacacgctatttttacgaaaactctgcgtcaccttaagtcataaaaattatcgtaatattgtttctttaactcagaatcaatcatttccgttagtgaatcgcctggcagcatttatattactctcgcaggaaggtgatctttatcacgaaaagcatacgcaagcggcagagtatttaggcgtttcttatcgacatcttttatatgttctcgcgcagttcattcacgacggtttattaattaaaagcaagaaagggtatctcattaaaaacagaaagcagttgtcaggactggcgctggagatggacccggagaataaattctccgggatgatgcagtaaaaattattttcaatagcgcgattgccggatgcaacgcttaatacgttttatccggtctacaaatcgagcattacgccagaccaataaagaacccggcaatagtcgcactcatcaggttggaaagcgttgctgctgccagcgcccgtaaaccaagctgggcgatttccggcgcgcgttttggcgaaatagccgaaaatgcgccaacgacaacaccgatagaaccaaagttagcaaaaccacaaagcgcaaaggagataatcgcaatggttttcacttccagcgtgccgcccgtttgcaggtatggggagaaactcaggtaagcgacgaattcgttaatcgccagtttctgcccaatcaggctacccgcaagattggcatcactccagtccacacccatgatccacgccagcggtgccagcacatagccaaaaatactttccagagaggcattggcgaaaccaaaccagccgccaattccgccgataatgccgttgatcagcgcaataattgcgacaaacgccattaccaccgtcgccacaccagcggcgatttttagcccggtcatcgcaccgctcgccgccgcttcgataaagctttttggcggcgtttcgctgaacgacagattttcaaatgtgacctgcgaaggctcggttgccgggctaagaatacgtgcaaacaaaatcccgccagggatcgccatcagcgatgccgctaacaggtagtcaattggtacgcccattccggcataaccaatcatcatcgaaccagcaatggacgccatcccgctacaaattgcggtaaacaactcgttgcgattcatgcgatcgataaacggtttaacgatcgccgggatctcattttgcccgaggaaaatagtagtaaccgcaacaaaagattcgattttgctgatgttgagggctttctggaaaatgctgccaaggatgcgaatcagcagccccatcacgccaatgtagtacagcagactgatgagcgcagtaacgaaaataatcgccggaagtacgcgaaaggcgaagataaaacccgcaccgtcaaacaggacatccattttcggcccaaccagcgaaccaaaaatgaaggcgctaccggcatcactgtaagacatcactttatgaacgcctaatgccgcctgttctactgcccattttcccggtgggaagtagagcatgatgccaccaatagcgatttgcagcagcagtgcggctccaaccgtgcgcaaactgatgctctttttattcactgacaacagaaatgctattgccagtaacaccaccatccccacaacacttctcattatatccataatgattttcccttcatgccggtaaacccggcgtcagcgccaggttttggtatgcttgatgagtacgggcgacggctttctgcccgtcagaaattaacccgcgagacgctgatattctttggcaatttcgctcgccagaatggcgttgttgaacaccagctggatgttggatttcaggctgtcaccgccggtcagttcagcaacgcgcgccagcaggaatggcgtactttctttaccaatgactccctgagcttcagcttcagctaccgcctgatcgatcgccgcattgatagtgtgttccggcatagcaaactgttccgggatcgggttcgctaccacgaggccaccgttcagaccgctttgccatttcaccgccattgcacgggcaatttcgctggcgctgtcgagacgaatgctgacgtcaaacgggctggtgcggcagaaaaacgcaggcagcgctttagtctgatagccaattaacggcacaccgaaggtttctaaatactcagtggttaatcctaaatcgagaatagatttcgccccggcacaaacaacggtgacattagtatttgccagttcttgcaaatcggcagaaatatcgaaggtatgttccgccccgcgatgcacaccaccaattcccccggtggcaaatactttaattccggcaagcgccgcaataatcatcgttgaagccacagtggttgcgccattttttccggcggcaacaacaaaaggtaaatcgcgacgactaactttggtcacgttatgcccttcacgacccagtaattcaatttcttctttgcttaaccccactttcatcacgccgccaataatggcgatcgtggcaggtacagcgccctgtttacgaatagtttcttcaacttcaattgcggtctgggcattttgtgggaacggcatcccgtgagaaataatggtcgattccagcgccacaaccggttttttgttttttaaagcgtcctgcacttccggggaaatttgtaataattcaggggaaatttttaattcagacattctgcgttctccactaacgatataacgttggcaatcgataaatcggggttattggtgtattcacaggagagcgccattgacgaacatccctgtgcgaaacgaacagattcggcaaacggcattccgtctacccaacacgaagcaagtcccgccatcatggcatcgcccgctccggtaacattaataacattggttttgatcggcgcagaccagccactttcaccgctgatatcgctgtaataaacgccgtcgccgcccatgctcaataccagtcggttcaggccatgttgatggaaccaggcagcaacttttgccacatcttcacgccctgacagcgcaatcccactcagggtttccgcttcaaggcggtttggcttgagagtgtggatctgatttagacggtcgcgcactttgacacatttccatgccgaaaccggatcgacaaatacgggtacgttggcggcattatccagaatccatgccagtgcctcttcactgatattacagtccgcgacaatgacctttgccctctgaataaattcaccgtgctgtgcgagatattcagctgtaatagcgttgctaatattcatgtcatttatagcaaccagcatttcaccggtattatcgagtaatgataaataactcgacgtattttctcccggcacaatcaggcatttatcgacataaacgccagattgattggtttgcgttagcagcgattgaccataaaaatcactgcctacggcgctcagtagccaggctttgttacccagcaacgccaggttttgtgcaatattgcgccctactccaccaggcgtaaattttattttacctggatttgaatccgcataatttaatgattcatgtgaatatccggcgacatcaatattcgccgaacctataattacgacataatccttttcgcgcatagcacgtcctctggtaaaaaattaccaaccctgtcaatccacaagaatatagatactgcaaagacggtttaaacatgtgttcatatttaaacatgtgctcatagtatgcatgttttacgtaaagtaaattaccgccagagaggcaaaatgggcagatttgagcaggctcacaaaatgcgattaaatgcctgaattacaaaagcgaggaatttgtgacgggatgcacagaacagaacaataaaaaagggcagaaaataatctgcccttgaggaaataacctgagtgtttgatgaacgtttgaagtttctactgaaagataaaaccatttaaattcataaaattacattcacaaaccggtcattctctttgcgctcatcaaatgttacaggacaggaaatttctgccctgtaacacaccttttattacgctgctttcgctactgcgtccacttccggacgtttcaggaaggcataggccaaacccgccaccagcgtaccggcaataattgctaccaggtaacccaataccggcgtaatagcgccagggatcagcagaacaaacagaccaccgtgcggtgccatcagtttcgcaccaatcgccattgagattgcgccagtcagcgccccacccacgatacagcacggcagcacacgcatcggatcacgagcagcaaacggaattgcaccttccgaaatgaagcacagtcccaataccagagcggctttgccaccttcctgctgcgctttgtcgaatttgcgacgcgccaccattgttgccagacccattgccagcggtggcaccatacctgccgccataatcgccgccatcgggccataggtttgagtactcagcagacccacaccgaatgcgtacgctgctttgtttaccggaccgcccatgtcagtacacatcatgccaccgaggatcgcccccagcagaaccgcattcgcagtccccatggtctgcagccagtgagtcagcccttcgagaatgccagcaactggtttaccgatcaggtagatcatcgccagaccgaccaccagactggaaattagcggaatgatcaggatcggtttcagcgcctccatactctgtggcagtttcaattgcgtactgattaacttcgcaatgtaaccagccaggaagcccgcaataataccaccaatgaagccagaaccggtgctgaccgccagcataccgccaatcagacccggagtgaggcccggacgatcggcaatggaaaaggcaatataacctgccagtaccggcaccatcagcgcaaaggctgaaccaccaccaatctgcatcagcgccgcagccaacgtacccggctctttaaacgcttcgataccaaaagcaaaagaaagcgcgatacacagaccacctgcaacgaccatcggcagcatgtaagaaacgcccgtcagcaagtgacggtatgcgcctgcactctctttcttactttcagtggtcgccgtttgagctttgcccgccggttcatacggcgttgcttcagcaaccgctttatccagttcctgcgcggttttcttcagcgccagaccggtagaggtacgatacatcggtttaccagcaaatttcgccagatccacttcgatatctgccgccacaatcaccagatccgctgctgcgacttcttcgggagtgattgcattacccgcgccaacagaaccacgggtttcaactttcacccaccagccacgttttttcgcttcggtttcaatggcttcagccgccataaaggtgtgtgctacgccagtcgggcaagcagtcaccgcaactacgcgtttcggaccgctggcggcaactggtgctgtcgcagcgaccggcgcagtgtaaggtttcgcatggcctttggcttcactcaggaacagctcagggtgcgcaactgcccgggaaatatcgcccagccagacatttttaccgttcagcgcgctgtcgttcgggatggaatcaccgagaacaatcgccatttcagcgtcgttcggattgtcgatgatttccagttttgcttttcgcgccgccgcgcccagcagggtcttcgccatataggcgcgtgcctgaccgagattagcgtcaataatcagcagcgttttcattatgcctctcctgctgtcagttaaaaggttgtaagtcgacgcgcgccatcattgcggccaactgcggacgatcggtaatacccacattgctttgacttaccgccagggctgcaacagctgtcgccagacgcagtgtgtgttcactggattcacgcatcagcaagccataaatcaggccaccaaccatagaatcccctgcgccaacggtgcttacgacatcgactgacggtggtttggcgatccattcgccggaggcattaacccaaagcgcgccttcggcacccagtgaaataacaacatgcgcgatgccttgttcacgtagcgcatgtgcagcttcaatcacatctttcatttcaggcagtttacggcctgcccagatttccagctcgcggcggttaggtttcaccagccacggtgccgctttcaaacctgctactaacgcttcacggctactatcaaagataatgcaaggacactgactacgcaggcgagtcatccagtcggtgaacgcttccgggctgacgcctgacggtaagcttccgctgacacagaccatatcgaactgaccgagccagctcagagaatcagtcacaaagcgttcccagtcggcgggggtgacttcaaaacccgagaagttgaagtcggtcacttcgccgtctttttccgtcagcttaacgttaattcgggtgcgcccctgtacaacctggaaacggttggcaatgcccagctcgctgaacagttgctgaaaaccatcctgattgtctttacccaggaagccgccaacggtgacatcaattcccaggtcttttaatactttggccacgttgatgcctttacccgccgcatgcagaccggtggttttcaccaggttcacttcgccgcgttcaatttccgggcagaaaccaacaaggtcataagccggattaagggtgatagtagcaacacgtctgctcattatgcgccctccccaagaccagcagcgatagcgtcgccgattgctttcagcgcctgttcagcatctgcaccctgggcggtaaagcgtaggcgatgacctttcttaacgccaagtgccacaactttcatcagactacgtccgtttgccggtttgccggtaccatcaaggtttgtcacggtaatatcactgttaaattgtttaatggtattgaccagcatggtacctggacgagcatgcaggccgtgttcattgcgcaccacaaactccgcgcttaacacgtcgtcggtcggcgcatcatcgctggtcagcagcgccagcaacgttgccgcatccgctttcagcaagcggtcagctttattgtcgagcaataaatcagcgagacgcttaagaaccgcgatgggctgatcgtcattcatcgccacactcaccagcatggctgccgtttcgccgtccacatcaaaagcatttgccgcacggcttaccgcaatcgcgctacgcagattgccttcggcgctatcgctcagccagataccctgtccgagattcagcggttgttcattgatggctttggtgacgaaagtggcgtcaactgcccccgcctctttcagacgcgcagcgttcagcgcctgaagagtcagcagatcgctggcgacgatatccagtgtcagcatttcgttgtcgagcttcagctgctcactctgcttttcgcccatcagtaatgcgcgaagttcttctgctgttgttgctgacttcagttgttcagcaacggaatcatcgctcagtacgtgggtcagctggcgtagcaggcccagatgttcatccgagctggcagcaataccgattgccacgtacgctacctgaccgtcaccccaggtgacgccttccgggaactgaaatacctgaacgccggttttcagcacctgatcgcgggtgtcggtagtgccgtgtggaatagcaataccattgccgaggaacgttgaggtttgctgttcgcgcgccagcatgccattgacgtagccttctgctacattaccggcctgcaccagcgccgcagcgacctggcgaatcgcctcttctttgtctccggccttttcgcccggatggatgtcctgtacggataactggaacatagttctcctctcttgctgaattgaaacgattcagcctctatgagaaaaaaagcgccaacctggcttagggttaaagacaagatcgcgctgaaacgtttcaagaaagcataatacttctgtttcagcacgcaaggaaagccgtaaagttatgagcaaaagtttgatgtgctgcacaattttttgccatttttcctaattgctgatgggaaaatccgttatcagcaatttcatttcagcagcgtcagcagccaatcagcaacagtgaaatggcattttgactattcgtggcgcttttgatttcgctgtctgtttattttctgacaagcagcgtaaactccgcgtcttcctcttccagtgatcgaccagcatgcataactcccccgcagtctccagcgcgaaatcgtttgacctgacctcgacggcgtttttaatcgttgcctttctcaccggtattgcgggcgctctgcaaaccccgacactcagtatttttcttaccgatgaagtacatgcccgtccggcgatggtgggattcttctttaccggcagcgctgtcattgggattctggtaagtcagtttctcgccgggcgctctgataagcgcggcgatcgcaaatcgctgattgtcttttgctgcctgttaggcgtgctggcctgcaccctttttgcctggaatcgcaactactttgttttgctattcgttggcgtctttcttagcagctttggctcgaccgctaacccgcaaatgtttgcccttgcccgtgaacatgccgacaaaaccggacgtgaggcggtgatgttcagctcttttttacgcgctcaggtttcactggcatgggtcattggcccaccgctggcttatgccttagcgatgggtttcagctttacggtaatgtatctgagcgcagcggtagcgtttattgtttgcggtgtgatggtgtggctgtttttaccgtcgatgcaaaaagagcttccgctggcgaccggcacgatcgaagcgccgcgccgtaaccgtcgcgatacgctgctgctgtttgtcatttgtacattgatgtggggctcgaacagcctgtacatcatcaacatgccgctatttattatcaacgaactgcatcttcccgagaaactggccggtgtgatgatggggaccgccgccgggctggaaatcccgacgatgttgattgccggatatttcgccaaacgtctgggtaagcgtttcttaatgcgcgttgctgccgtgggtggcgtctgtttttacgcaggaatgctgatggcgcattcacctgtcattctgttgggcttgcagctgctaaatgctatttttattggcattctgggcggcatcgggatgctctattttcaggatctgatgcccggtcaggcgggttcagccaccacgctctataccaacacttcgcgcgtgggctggatcatcgcaggatcagtggcgggcatcgtcgccgagatctggaattatcacgctgtgttctggtttgcgatggtgatgattatcgccactctgttttgcttactgcggattaaagatgtttaaggcgcggtcagcatttccagatcgataagccaggtcatggcctgctgacgcgagttaccgcacatttcagcgctggcttgtaagcctgcacagactttcggtcgcagtggcgaggtgaaaattttacagcgttgctgttcatcaagctgaatgcagggcgtattggcgggcttgccatctggcataccgggaatagggctggaaattgaaggggcagtgcaacacgccccgcaacccggacggcattccatacgttgttctcttaaggttaaccaccggattgatgagcgcgcacagtaccaccttttttgcaccagcaaaagtgcgaataccacttgcccgaaaggcccgtcgcgagtactttgtcgcgatatttttgacattttcgactacaggaatttttcgatgccaagagcgaacgaaattaaaaaaggtatggtactgaattacaacggcaaactgctgctggttaaggatattgatattcagtcgcccactgcccgcggtgccgctacgctgtacaaaatgcgtttttctgatgtccgtaccgggctgaaagtagaagagcgtttcaaaggtgatgatatcgttgacaccgtgacgctgacccgccgttacgttgacttctcctatgtcgatggcaacgaatatgtctttatggataaagaagactataccccgtataccttcaccaaagatcagattgaagaagagttgctgtttatgccagagggcggcatgccggacatgcaggtgctgacctgggacggtcaactgctggcgcttgagctgccgcagaccgttgatctggaaatcgttgaaaccgcaccaggcatcaaaggggcatctgccagcgcccgtaacaaaccggcgacattgagcactggtctggtgattcaggtaccagaatacttaagcccgggcgaaaaaattcgtatccatatcgaagaacgccgttatatggggcgtgctgactaacttcagccgcatgcagaaaagggatagctcaggctgtcccttttttaatttattataccaatcttctattttgcgcttcctgaacaccttacgccctcaattttcactcgttgattgatcgccctcacacttcatcgcattaacaatccagaccaatttcaattgctgtcatataactttacactgtcgttgttaattaatcgttactaagacgtgactcctatgaatacaatcgcctccgttacgctcccgcatcatgtacacgctccacgctatgatcgccagcagttgcaatcacgtatcgttcattttggctttggagcctttcaccgcgctcatcaggcgttactgaccgatcgtgtgctgaatgcccagggcggcgactgggggatctgtgaaatcagcttgttcagcggtgatcaactgatgagccagctccgcgcacagaaccatttatataccgtgctggagaaaggggcggacggcaatcaggcgataattgtcggtgccgttcacgaatgccttaatgcaaaactggattccttagcggcaattattgagaagttttgcgagccacaggtggcaattgtttccctgacgattaccgaaaaaggctattgtattgacccggccaccggtgcactcgacaccagtaatccgcggattattcacgatctacaaacccctgaagaacctcactccgcaccgggtattctcgtcgaagcactgaaacgccgccgtgagcgcggccttacaccgtttaccgtgctctcctgcgacaatattcccgacaatggccatgtggtgaaaaacgcggtgctgggaatggcagaaaaacgttcgccagaactcaccgggtggataaaagaacacgtcagttttccgggaaccatggtcgaccgcattgttccggctgcaaccgacgaatcactggcagaaatcagccagcatctgggggtaaatgatccctgcgcgattagctgcgaaccgtttatccagtgggtggtggaagataacttcgtcgctgggcgtcctgcctgggaagtcgcaggtgtacaaatggtgaatgatgtcctgccatgggaagagatgaaactgcgtatgcttaatggcagccactcttttctcgcttatctgggttacctttcaggattcgcccatatcagtgattgcatgcaggatcgcgcatttcgccatgccgccagaacattaatgctgaatgagcaagcgccgacactacaaattaaagatgtcgatttaacacaatatgcggacaagttaattgcacgttttgctaatccggcgctgaaacataagacctggcaaatcgcaatggatggtagccagaaattaccgcaacgtatgctggcaggtattcgcatacatctggggcgcgaaacggactggtcgttgctggcattaggcgttgcaggctggatgcgttacgtcagcggcgttgatgatgccggaaatgccattgatgttcgcgatccgcttagcgataaaattcgcgaacttgttgcgggcagcagcagtgaacaacgcgtaaccgccctgctttccctgcgtgaagttttcggtgatgatctgccagataacccgcattttgtgcaggccatcgaacaagcctggcaacaaatcgtacaattcggcgcacatcaggcgctattaaacaccctcaaaatttaacgatttctgcggttaaagcggatgaagctcaccttcgtccgctctccccttctcttttctgccttttttagccaggattaacgctcagttaacttaccagagtattgcggagccgttgtgaccaggaccaacctcatcaccggttttctcggcagcgggaaaaccacgtcgattcttcatctgttagcccataaagatcccaacgaaaaatgggcggtactggttaatgaatttggggaagtcggaattgatggtgctttgctcgccgatagcggcgcattgctgaaagagatccccggcggctgcatgtgctgcgttaatggtttacccatgcaggtagggttgaataccttactgcgtcagggaaaaccagaccgcttgttgatagagccgaccgggctgggccatccgaaacagatcctcgatctgttaaccgcaccagtctatgaaccgtggatagatctgcgcgccaccttgtgcattctcgatccacgcctgctgctggacgaaaaaagcgccagcaatgaaaacttccgtgaccagctggctgccgcagacatcattgtcgccaataaatccgaccgtgcgacgcccgaaagtgagcaagcgctacagcgttggtggcagcaaaatggtggcgatcgacaattaattcacagtgagcatgggaaagttgacggtcatcttctggatttgccgcgtcgcaatttagccgagttgcccgccagcgccgcgcattctcatcagcatgtcgtgaaaaaagggttagcagcgttaagcctgccagagcatcaacgctggcgtcgcagtctgaacagcgggcaaggatatcaggcctgcggctggatattcgacgctgatacggtattcgacaccattggcattctggaatgggcgcgacttgcaccggtggaacgcgtcaaaggcgtgctgcgtattcccgaagggctggtacgaatcaaccgtcagggcgatgacctgcacattgaaacgcaaaacgttgcgccaccggacagccgtattgagctgatttccagcagcgaagctgactggaatgccttacagagcgcgctgttgaagcttcgtttagcgactaccgcgtaaggttgcctgcgtttttcagtaagataattagagaaaatatgattaaaaatttgccgcaaatagtgttgttgaatattgtcggcctcgcgctgtttctttcctggtatattcccgttaatcatggattctggttgccgattgatgcggatattttttatttctttaatcagaaactggtcgaaagtaaggcctttttgtggctggttgcattgaccaacaatcgcgctttcgacggttgttctctgctggcgatgggaatgttgatgctgggtttctggctgaaagaaaacgcccctggcagacgacgtatcgtgattatgggtctggtcatgctattaactgcagtggtattaaaccagctgggtcaggcattaattcctgtaaaacgggccagcccaacattgacttttaccgatattaaccgcgtcagcgaactgctctctgttcccacgaaagatgcctcacgagatagctttcccggcgatcacggcatgatactgcttattttttcggcattcatgtggcgttatttcggcaaagttgcaggccttatcgcccttattatttttgtggtttttgcatttcccagagtaatgattggcgcacactggtttactgacatcattgtcggttcgatgaccgtgatattgatcggtttgccctgggtgttgctgacgccattaagtgatcgattaatcaccttttttgacaaatcactaccgggaaaaaacaaacatttccaaaacaaataactcacagtaattaacatcatcaggcttatttttatagtgaggataatcctgatgatgcgcaccgtgctttcatccatcgcgcgcaaaaatcattctctaagtaaatgaatggattgcatgcgtttcactcaatcgtactttaattgaccaatcccgcttattaactttctgtatcactttttcttataaaaaatcatgcaaaaccgctcgccaagaccgcatcaatcgggtaatctcgaactcgttttgcctcggcggtagattatcctcacagcatataattttgtgcgttagtccacagatttggccttaaggaattgtttcaacatgcccaggtaattagtctcgtgtcgcttggcatttttttataacgatatttgtcgttaaggacttcaagggaaaacaaacaacatggtcaaatctcaaccgattttgagatatatcttgcgcgggattcccgcgattgcagtagcggttctgctttctgcatgtagtgcaaataacaccgcaaagaatatgcatcctgagacacgtgcagtgggtagtgaaacatcatcactgcaagcttctcaggatgaatttgaaaacctggttcgtaatgtcgacgtaaaatcgcgaattatggatcagtatgctgactggaaaggcgtacgttatcgtctgggcggcagcactaaaaaaggtatcgattgttctggtttcgtacagcgtacattccgtgagcaatttggcttagaacttccgcgttcgacttacgaacagcaggaaatgggtaaatctgtttcccgcagtaatttgcgtacgggtgatttagttctgttccgtgccggttcaacgggacgccatgtcggtatttatatcggcaacaatcagtttgtccatgcttccaccagcagtggtgttattatttccagcatgaatgaaccgtactggaagaagcgttacaacgaagcacgccgggttctcagccgcagctaataaaccgtttggatgcaatcccttggctatcctgacgagttaactgaaagcactgcttaggcagtgcttttttgttttcattcatcagagaaaatgatgtttccgcgtcttgatccaggctatagtccggtcattgttatcttttaaatgttgtcgtaatttcaggaaattaacggaatcatgttcatacgcgctcccaattttggacgtaagctcctgcttacctgcattgttgcaggcgtaatgattgcgatactggtgagttgccttcagtttttagtggcctggcataagcacgaagtcaaatacgacacactgattaccgacgtacaaaagtatctcgatacctattttgccgacctgaaatccactactgaccggctccagccgctgaccttagatacctgccagcaagctaaccccgaactgaccgcccgcgcagcgtttagcatgaatgtccgaacgtttgtgctggtgaaagataaaaaaacattctgttcatctgcgaccggtgagatggacattccactcaatgaattgattccggcgctcgacattaataaaaacgtcgatatggcgatcttacccggcacgccgatggtgccgaacaaacccgcaatcgtcatctggtatcgcaaccctttgctgaaaaatagcggcgtctttgccgctctgaatctcaacctgacgccttcactcttttatagttcacggcaggaagattacgatggcgtcgccctcattattggcaatactgcgctatctaccttttcttcacgtttgatgaacgttaacgaattaaccgacatgccagtccgtgaaactaaaattgcgggcattcctctgaccgttcggctttatgcagatgactggacatggaacgatgtgtggtacgcatttttactgggcggcatgagtggaactgtcgttggcctgctctgctattacctgatgagcgtacgtatgcgccccggcagagaaatcatgaccgccatcaagcgcgaacaattttacgtggcgtatcaaccggtggtggatacacaagctttgcgagtaacgggcctggaagtactgctacgctggcggcatcctgtcgcgggagaaattcccccggatgccttcattaactttgccgaatcgcaaaagatgattgtgccgctgactcagcacctgtttgagttaattgcccgcgatgccgcagaattagaaaaagtgctgccggtaggcgtcaaatttggtattaacattgcgccggaccatctgcacagcgaaagctttaaagcagatatccagaaactgctcacttccctgcccgcacaccatttccagattgtgctggaaattaccgagcgcgatatgttgaaagagcaagaagccacacaactcttcgcctggctgcactcggtcggcgtagaaattgctattgatgacttcggcaccgggcacagcgcgcttatctatcttgagcgttttacgctcgattatctgaaaattgaccgtggatttatcaacgccatcggtacggaaacgatcacttcacccgtacttgacgcggtgctgacgctggcgaaacgcctcaatatgctgacggttgctgaaggggtcgaaacgccggaacaggcgcgatggctaagcgaacgcggcgttaatttcatgcaaggctactggattagtcgcccgttaccgctggacgattttgttcgctggctgaagaaaccgtatacgccgcagtggtaaggtgtgcttacgtcccttattattcatagtgaaagcatgccggattgcggctaatgatgagtaaaaggaaatccgttgcagatgattgtgcgcatactgctgctgtttatcgccctgttcaccttcggtgcgcaggcgcaggctatcaaggaaagctatgcctttgccgtgctgggcgaaccccggtacgcatttaatttcaaccattttgattatgtgaaccccgccgcgccaaaaggtgggcagataacgttgtcagccctcggcaccttcgataatttcaaccgctatgcactgcgcggcaacccgggcgcacgcaccgagcagttgtacgacacgctatttacgacttccgatgacgaaccaggcagttattacccgctgattgctgaaagtgcacgctatgctgacgattattcctgggtggaggtcgctattaatccgcgcgcccgttttcatgatggttcgcccattactgcccgcgatgtagagtttacttttcaaaaatttatgaccgaaggcgtgccgcaatttcgtctggtctacaaaggcaccaccgtcaaagccattgcaccgttaaccgtgcgcattgagttagctaaacccggcaaagaagatatgctgagtctgttttcgctgccggtatttccagaaaagtactggaaggatcacaaacttagcgacccgctcgccacgcctccgcttgccagtggtccgtaccgcgttacgtcctggaaaatggggcaaaatattgtctattcccgtgtgaaagattactgggcagcaaacttaccggtaaaccgtggacgctggaatttcgacaccattcgctacgattattacctcgatgataatgtcgcctttgaagcgtttaaagcaggtgcctttgatttgcgtatggaaaacgacgccaaaaactgggccacgcgttataccggtaaaaatttcgataaaaaatacatcatcaaagatgagcaaaagaacgaatcagcccaggatacgcgttggctggcgtttaatatccaacgtccggtattcagcgattgccgggtccgggaagctatcactctcgcctttgactttgaatggatgaacaaggcgttgttttacaatgcctggagtcgcacgaacagttattttcagaataccgaatacgcggccagaaattaccccgacgccgcggagctggtgcttctggcaccaatgaaaaaagatctaccgtcagaagtcttcacacaaatctaccagccgccggtatccaaaggcgatggctacgatcgtgacaacctgttaaaagccgacaaacttctcaacgaagcgggctgggtgctgaagggtcagcaacgcgttaatgccacaacgggtcagccactcagctttgaattattgcttcccgcaagcagcaatagtcagtgggtattgccgttccagcacagcctgcaacggctgggtatcaacatggacattcgcaaggtggataactcgcaaatcactaaccgcatgcgcagtcgcgactatgacatgatgccgcgcgtatggcgggcgatgccgtggcccagttccgatttacagatttcctggtcatcggaatatatcaattccacttataatgcccccggcgtgcaaagcccggttatcgactcgctgatcaaccaaattattgccgcgcagggaaataaagaaaaattactgccgttggggcgagcactggatcgcgtattaacgtggaattattacatgctgccaatgtggtacatggcggaagaccgtctcgcctggtgggataaattctcccagccggccgtgcgccccatctatagcctcggtatcgatacctggtggtatgacgtcaataaagcggccaaactgccgtccgccagcaaacagggagagtagatgggcgcttacctgattcgccgtctgttgctggtgatcccaacattatgggcgattatcaccatcaactttttcatcgtgcaaattgcgcctggcggtccggtcgaccaggccatcgccgccattgagtttggtaatgccggagtattacccggcgcaggcggtgaaggtgttcgtgccagccatgcgcaaacgggtgtcggcaatatcagcgacagtaattaccgtggcggacgcggattagatccagaagtgatcgctgagatcactcatcgctacggttttgataagccgatccacgaacgttacttcaaaatgctctgggactacatccgctttgattttggcgatagcctgtttcgcagcgcctcggtgctgacgctgattaaagacagtctgccggtttccatcaccctcggattgtggagcacgctgattatctatctggtgtcgattccgttaggcattcgcaaagctgtttataatgggagccgctttgacgtctggagtagcgcatttatcatcatcggctacgccattccggcctttttgtttgccatcctgctgattgtcttcttcgcgggcggcagctatttcgacctgttccctctacgcggcctggtttccgctaactttgattcgctgccgtggtatcagaaaatcaccgattatctgtggcatatcacgctgccggtgctggcgacagtgattggtggctttgcggcgctgaccatgctgacaaaaaactcattccttgatgaagtgcgcaagcaatacgtggtgaccgcgcgtgcgaaaggggtaagtgaaaaaaatattctctggaaacatgtgttccgcaacgccatgctgctggtgattgccggttttccggcgacgtttatcagcatgttttttaccggctcgctgctgattgaggtgatgttttcactcaatggtctgggcttactgggctacgaagcgaccgtctcgcgcgattatcctgtaatgtttggtaccttgtatattttcaccctgattggcctgctgctgaatattgtcagtgatatcagctatacgctggttgatccgcgtattgattttgagggacgttaatgtcgcgactcagccccgtcaatcaggcccgttgggcgcgttttcgtcataaccgtcgcggctactggtcgttatggattttcctcgtcttgtttggtttgagtttgtgttctgaacttatcgccaacgataaaccgttgctggtgcgttatgacggcagttggtatttcccgttattgaaaaactacagcgaaagcgattttggcggcccgctggcaagtcaggctgattatcaggacccgtggctgaaacaacggctggaaaataacggctgggtactgtgggcaccgattcgctttggtgctaccagtatcaactttgctaccgataagcccttcccttctccaccctcccggcaaaactggctgggaacggatgccaacggcggcgatgtgctggcacgcattctctatggcacgcggatctcggttctgtttggcctgatgctgactctctgttccagcgtgatgggcgtgctggcgggggcgctacaaggctattacggcggtaaagtcgatctctggggacaacgctttattgaagtatggtcggggatgccgacgctgtttttgattattttactttccagcgtcgtacagcctaacttctggtggctgctggcaattactgtcttgtttggctggatgagtctggtcggcgtggtgcgggcggagtttttacgtactcgtaatttcgactacattcgtgcggcacaggcgcttggcgtcagcgatcgcagtatcatcctgcgtcatatgttgcctaatgccatggtcgcgaccctcacctttttaccgtttattttatgtagttcgataaccaccctgacctcgctcgatttcctcggcttcggtctaccgctcggttcaccgtcactcggtgaactgctgttacaagggaaaaataaccttcaggccccgtggcttgggatcaccgccttcttgtcggtggcgatattattgtctttgctgatctttattggtgaagccgtccgcgacgcatttgatcctaataaggcggtgtagcatgacgcaaactctgttagcgattgaaaatttgtcggtgggttttcgccatcagcaaaccgtacgtacagtagtcaatgatgtttcactacagattgaggctggcgaaacgctggcgctggtgggtgagtcaggttcaggcaaaagcgttaccgcgctgtcaattttacgcctgctcccttccccgccggttgaatatctctccggcgatattcgttttcatggcgaatcgctgcttcacgccagcgatcaaacgttgcgcggtgtacgcggtaataagatcgccatgatttttcaggaaccgatggtgtcgttaaatccattgcataccctggaaaaacagctttatgaagtgctttcactccaccgcgggatgcgtcgggaagcggctcgtggcgaaattcttaactgccttgatcgcgttggtatccgccaggcggcaaaacggctgacagattatccgcatcagctctccggcggcgaacggcagcgggtgatgattgcgatggcgctgttaacgcgaccggaattattaattgccgatgaaccgaccaccgcactggacgtctctgtccaggcgcagattttacagctgttgcgcgaactgcaaggcgagctgaatatgggcatgctgtttattactcataacctcagcattgtcagaaaactggcccaccgcgtggcggtaatgcaaaacggtcgctgtgtcgagcaaaattacgccgctacgctatttgcatcacccactcatccttacacacaaaagctactcaacagtgaaccgtcaggcgatccagtgccgttgccagaacctgcctcaacgttgctggatgttgaacagcttcaggttgccttccccattcgcaaagggattttgaagcgcattgtggatcataatgtggtggtgaaaaacatcagttttacgctacgagcgggtgaaacactgggtttagtgggcgagtccggttccgggaaaagtacgacgggactggcgctgctgcgactgattaattctcagggcagcatcatctttgacggtcagccactgcaaaatttaaatcgccgccagctgttacctattcgtcatcgcattcaggtggtatttcaggatccaaactcctcgctcaacccacgactcaacgttttgcagattattgaggaaggcttacgggttcaccagccgacgctttctgccgcacaacgcgaacaacaagtgatagccgtgatgcatgaagtgggattagatcctgaaacacgccaccgttatccggcggagttctctggtggtcagcgacaacgtattgcgattgccagggcattaattcttaagccctcgctgatcatacttgatgaaccgacatcatcactcgacaaaacggtacaggcgcaaatattgacgctattgaaatcattgcaacaaaagcatcaactggcctatttgtttatcagccacgatttgcacgttgtccgcgcgttatgtcatcaggttatcatactgcgacaaggggaagtagtggaacaaggaccgtgcgcgcgcgtgtttgccacaccgcagcaggagtatacgcgtcagctactggcgttgagctgacgcttaaaaaggattgtagtttgaaaagggttcggcaattgccacaccaaaatttttcaatcggcatgttgcagcaaactcgtcctggcgatttacaaacaggcacggctcaccttcacactccagcaccgaacatggaacttcgatgtcgcttaacgcctggcttagtttatacatcaccgaccatgcattatcaccatccgggctaagcaatttaagcgccaccaggctgttgtcaccgcacggtccattttgcggaatcggttcaaccttcgaacctgcgaaaccagcagaccagcgatagttctgcggcagtcgatggacgattgagagttgtaatgaagtcacttattttccccggaagcacattcacttcacaatttatttacatcaattttaacacatcatcaacaatccgtctttatacagatcgtaaagattgatgcctcgcctgcgtggcctctatggctctgatttaagtaatatctgcgggcgtggtcacgtttgcggggctatatgtacccgtttctgcgatctaactcaacctttttaactacaatgatgtgactttttacataaattgattttacataaaataaacatatatcgggggaatgatagatttgtggttgacatgcatcaacaaaggaagccttttagcttcctcgttgtgcaatagatcaccgttttttcggccgactggcgtacagacagaagagaatggagctggttgcgcagaatgcaattgaccaaatcatcggccatgcagagttaaaggtcgcaagagaaagcaatgcgccaacaattgcccctatgccaaaacggaaggttcctgccagcgaagatgccgttcccgccatatggggaaactcatcaagaatgaccgccatcgcattggatgacaccatcgacacgcagcccacaaacgccgcaacgccaaccaccagcgaccaaaatcccagccccagcagcgcactgatgaccatccacgctgccataataaattgtatccacaaccccgagcggaacatatttaacgcgccaatgcggcggacgaagcggctgttaaagatggtcatcacgaacagaaaaacaatgtttagcgcaaagtaataaccaaagttttccggcgcgacgtggttaatttcaatataaacaaacggtccggcgcttaagaatgagaacatcccggcaaagctgaaaccactggcaagcatgtagctcaggacacgtttatggcggaacagcgccgcaaagttaccaatagtggtacgaatgtgaaatggctgacgacgctccggtggtaaggtttctttaatcaggaagaaaatcattgccgaagccagaatcgccgctaatgccaggatccagaagatgtaatgccagctcagccacaccagcacccagccgccaactatcggtgccatcagcggtgcaatggttgtcaccagcatgacaaacgacatcatccgcgagaactcttctttcgggtaaatatcgcgcatcagggcgttaatgaccacgctggccgcagccgcagccagcccgtggaagaaacgcatcacaatcagctgatcgatggtgtttgccaacgcacacgccaccgcggcggcggcaaacaccagcgtaccgccgagcaccaccggcttacgcccgaagctgtctgccatcggcccgtagattaactgccccaacgcaaagcccagaatataagtactgagggtcatctgcgtactgcccgccggtacgccaaactgcgctgaaattaccggtagcgcgggcagatacatatcaatcgacagcggcatcaacatggccagcaggccaaggataaaaacaatagcaaacgacgaatgctgtcgggtggtcacaacgggctcctgaaagtcattgaaaagttagacgacgctggcaatttcttcttcagttaacggacgatattcaccgggggctaaatcagcatccagcgtaataccgccaatacgttcacgatgcagctcaaccacgtggttacccacggcggcgaacatgcgtttcacctgatgataacgcccttcgctgatggtcagacgaacctgcgttggggtaatcacttccagcaccgcaggcttagtgagatctttttcgttatgcagctgcacgcctttagcaaattgctctgccgtatcgtcagctacaggtgattccagtgtcaccagataggtcttctcgcaatgatggcgcggagaagtaatgcggtgcgaccactgaccatcatcagtcatcagcaccagaccggtggtatcaatatccaaccgccccgccgcatgcagtttccacgctaccggttcatcaagaaaatagagcaccgttgggtgatcagggtcgtccgtggagcaaacatagccctgaggcttattgagcatgaagtaacgtggaccgtgttgctgcgccagcgggttgccatcgtaagcgacatcatgttcaggaagcagtttgaacgctgcattacggacgatttcgccatcgacggtgacacgattgccgcggatttcacgcccggcaatagcacggctaacgccgagttgctgtgcgataaatttatcaagtcgcatgtgtgtgattttgcctgtaaaaacggaggtcgggcattgacccgaaaatctgaactgttgtctgcccagtatagcggtctaataacatccctcaagggaaaaagatccatggcatactattagcagaataatctacctacgcgagaccatgatttttacacttcgcccatatcagcaagaagccgtggatgccacgctcaaccattttcgtcgtcataaaacccctgccgttatcgtgctgcccaccggcgcaggtaaaagcctggtgatagcggaactggcacggctggctcgtggtcgcgtgctggtgctggcacacgttaaagaactggtggcgcaaaaccatgcaaagtatcaggcgctggggctggaagccgatatttttgccgccgggctaaagcgcaaagagagccacggtaaagtggtatttggcagcgtgcagtctgtcgcccgtaatcttgatgcctttcagggtgaattttcgctgttgattgtcgatgaatgtcaccgtattggtgacgatgaagagagccagtatcagcaaatcctcactcacctgacaaaagtgaatccccacttacgcctgctggggctgactgccacgccttttcgattgggcaaaggctggatctaccagtttcattatcacggcatggtacgcggcgatgagaaagcccttttccgtgactgcatttatgagctgccgctgcgttatatgattaaacacggctatctgacgccgccagaacgactggatatgccagtagtgcaatacgatttcagccgcttgcaggcacagagtaacgggctgttcagcgaagccgatctcaaccgtgagctgaaaaaacaacaacgtattaccccgcacatcatcagccagattatggagtttgctgcaacgcgcaaaggggtgatgatttttgccgcgacggttgaacacgcaaaagagattgtgggattactgcctgccgaagatgcagcactgattactggcgacacccccggcgctgagcgcgatgtgttaattgaaaattttaaagcccagcgttttcgctatctggtcaacgtcgcggtactgaccaccggatttgacgccccgcacgtcgatcttatcgccattctgcgccctaccgaatcagtgagtctttaccaacaaattgtcgggcgcggtctgcgtctcgctccgggcaagactgattgcttaattcttgattatgcgggtaatcctcacgatctctacgcgccggaagttggtacaccaaaaggcaaaagtgacaacgttccggtacaggttttctgccctgcctgcggttttgccaacaccttttgggggaaaacgaccgccgacgggacattgattgaacactttggtcgtcgctgtcagggatggtttgaagatgacgacggtcatcgcgaacaatgtgacttccgtttccgttttaaaaattgcccgcaatgtaacgcggaaaacgatattgccgcccgccgctgccgcgaatgtgacaccgtactggttgatccggacgatatgttaaaagcggcgctacgactgaaagacgcgctggtattacgctgtagcggcatgtctttgcaacatgggcacgacgagaaaggcgaatggttgaaaatcacctattacgatgaagacggcgcggatgtgagtgagcgtttccgtctgcaaacacctgcccagcgtaccgccttcgagcagctttttatccgcccgcatacgcgcacaccgggcatcccgctgcgctggatcaccgccgccgatatcctcgcccagcaagccttattgcgacacccggattttgtcgtcgcccgcatgaaaggccagtactggcaggtgcgtgaaaaagtgttcgattacgaaggtcgttttcgtctggcgcacgaattacgcggttaatggtagttttgattgatgtataaggcgattgagtatagaatctcgcccgcttttgcatacgcaaagcagatcacttacctgttgctgggtcgcctgtagcaggattaatttaagagagaaagaaatgtttactatcaacgcagaagtacgtaaagagcagggtaagggtgcgagccgccgcctgcgtgccgctaacaagttcccggcaatcatctacggtggcaaagaagcgccgctggctatcgagctggatcacgacaaagtcatgaacatgcaagctaaagctgaattctacagcgaagttctgaccatcgttgttgacggtaaagaaatcaaagttaaagctcaggacgtacagcgtcacccgtacaaaccgaagctgcagcacatcgacttcgttcgcgcttaattgctgaataagttgtaaaaaaccccgctccggcggggttttttgtatctgcagattatgcctgattacggtattgctattttttgcaggccagataaggcgttcacgccgcatctggcattcagaacacaaaaccgattaattgccgccagacgtccggcgctgcaattggtcgcgcaaattcggcggcgtgcctttaatggtcaaggtatcggttgctggatcccagaagatgcgttcacctaacagcatcgcatcaaagttaatagtcaagccaccgccgctaccggcaaacttcgtcaactgacgcagtgtgctacggtctgccgggaagctctcttccagttcgtagcctttttcagccgcaaactccgtgaagctcacttcgcttacgcctgccagctctttcgacagcgatttcagttcgatctcttcgcctgcctgcagctgctcattacagtagctataaacctgctggcgcacgttctgtcgctctgctttatccagttgtgcttcggcagtgaaatcatcaaccgcttgcaacagcccacggttttgcgctttcgcgtttaacccttcgctggccccgaggaaatccataaagaaatccgccactttgcgccctactcgccctttcaggaaagtgagatagcgggtggactctggattggtttcccattcggttaaatcgatacgcgcaacaatatccgcatgattgatatcaagataatgggttgggttgatgtcgagattttcgttaacgcgcatactgctcaggttgctcagaactgccaccagcaaatactccaccgccagatagcgatagtggcaaaacagcacgaatccaccgtcagcaaaaggatatttcgctaattcgtcacgcaggcggccggttgccgcgcggctaaatgccaggaagtcctcttcgccctgacgctgtaagcgcagcgtctgcgccagttcactctcttcgctaaacaagccgtaagctttatttttggcgctatagacccgatgcagttctgccaccatctcaacgacggtttctgtcggttccagcaatgaatcgcgcaacaccagctcaaggttctgctcatcacgcttgataagctggtgcagagcaatctggttgatatccagactcatgataaactctcctttaagaccgggcggtattcaaccaccgccggttaagcgacgcaataaaagatggcggtcattttacagaaggcagcgtaacgagaatgatttaacgcataaaaaagcagaaaaaaaaccgttgctacggtaatatgttgccctttcatcaactaactgatttcgatttatgccacaaatttcccgctacagtgatgaacaggttgaacaattgctcgcagagctgctcaacgtactggaaaaacataaggctccgaccgacctttccctgatggtgttaggcaacatggtcactaaccttatcaacaccagcattgccccggcccaacgccaggcaattgccaactcttttgcccgcgccttacagtcctctatcaacgaagacaaagcgcactaagggaaacagataacaggttatggtaactcatcgtcagcgctaccgtgaaaaagtctcccagatggtcagttgggggcactggtttgcactgttcaatattctgctttcgctcgtcattggcagccgttacctgtttatcgccgactggccgacaacgcttgctggtcgcatttattcctacgtaagcattatcggccatttcagcttcctggtgttcgccacctacttgctgatcctcttcccgctgacctttatcgtcggctcccagaggctgatgaggtttttgtccgtcattctggcaacggcgggaatgacgctattactgatcgatagcgaagtctttactcgtttccatctccatcttaatcccatcgtctggcaactggttatcaacccagacgaaaatgagatggcgcgcgactggcagctgatgttcatcagcgtgccggttattttattgcttgaactggtgtttgcgacgtggagctggcaaaagctgcgcagcctgacgcgtcgtcgacgcttcgcgcgcccgctggccgcattcttatttatcgcctttatcgcctcgcatgtggtgtatatctgggccgatgccaacttctatcgcccgatcaccatgcagcgcgctaacctgccgctttcgtacccgatgacggcgcgacgttttcttgagaagcatggtctgcttgatgcgcaggagtatcaacgccgtcttattgagcaaggtaatccagacgccgtttccgttcagtatccgttaagcgaactgcgctatcgcgatatgggcaccgggcagaatgtgctgttgattactgtcgatggcctgaactactcacgcttcgagaagcagatgcctgcgctggcaggttttgctgagcaaaatatttcgttcacgcgccatatgagctccggcaacactacagacaacggcatctttggcctgttctatggcatctcgccgagctatatggacggcattctgtcgacccgtacgcctgcggcattaattactgcgcttaatcagcaaggctatcagctggggttattctcatcagatggctttaccagcccgctgtatcgccaggcattgttgtcagatttctcgatgccgagcgtacgcacccaatccgacgagcagaccgccacgcagtggatcaactggctgggacgctacgcacaagaagataaccgctggttctcgtgggtttctttcaatggtactaacattgacgacagcaatcagcaggcatttgcacggaaatatagccgggcggcaggcaatgtcgatgaccagatcaaccgcgtgctcaatgcactgcgtgattctggcaaactggacaatacggtggtgattatcactgccggtcggggtattccactgagcgaagaggaagaaacctttgactggtcccacggtcatctgcaggtgccattagtgattcactggccaggcacgccggcgcagcgtattaatgctctgactgatcataccgatctgatgacgacgctgatgcaacgcctgctacatgtcagcacacctgccagcgaatattcgcaaggtcaggatttgttcaaccctcaacgccgtcattactgggttaccgcagcggataacgatacgctggcaattaccaccccgaaaaagacgctggtactgaacaataacggtaaataccgcacttacaacttacgtggtgaaagagtgaaagatgaaaaaccacagttaagtttgttattgcaagtgctgacagacgagaagcgttttatcgctaactgattaattataaatcagttagcgaaatatcttacttgcaatcggtgtggaaaacggtagtattagcagccacgagtcggcacgtagcgcagcctggtagcgcaccgtcatggggtgtcgggggtcggaggttcaaatcctctcgtgccgaccaaaaatcccaagaaaaaaccaacccttacggttggtttttttatatctgcaattaattcgataaacagaccgtgacacatcacagcctgtttattttctgttatcagaacgtccagaccacacccgcctgagtattccacggcgattctacccctgcgccattgccatagctgactgacaaatgaccgcttaacgtcggggtaaacgatgaccttataccagcctgataaacgccactggttccagccacatcattattaaatttgccatcgtcattaactttcacctggttagaatcggcgtattcctgacgcacggccgctttcagccagggttccagcgtcgtaccgttttgcaggtccatgtgatagcttaccgccgttcccgcttcagcgcgtaatatccgggtatttcccacatccgcgcgcatgccgtttgataacgtgtagtcctgaccatctgtggtaaagccggtaaaggccagatagggtctaacactccacaatccgtcaacccaacggaacccgctctcaacatgagcacccgcgccgttactattgtaatcgccaaacgctgttgccccattactcatcttgccatggatggtgttggcaaaacggtcaactttcaccaccccatcaacataggcaccgttctgatgctcccaaccggcataagcccccagggtatagctatcgatattacctttgccgccgcgatcaaaaccaatatcagaatgagagtaaccaaagatcaagccgcgaattgtactgctttcttcacgggagaaacggctatcgataccgagcgtcaggcccgtcaatgtttgctcaaaaccagctcccgcatcagtggtcacgttgttgcgggtgttaattgccgaactccacatcgccgtatcgtaactaacgccttttacgctaccaagacgctcacgcacggtgtccagttctgcatcaaataccagcggttgtgcggccgccatattcagcacatcagtggttgaaggggtaatttgcgcgcgattctctgccagactccagctatggttgccattatccagcaaggtatattcatacgtaccgatatcaacaacgcctccggcattgcccaacgtaaatgcagcatcaccgccgcccgttgttaccagtgtaaggctatctcctgctgccgggctggcaccggtgtccgtcacgaatattttgaaatcacctgttgcctgaccggtgacgttgagctgatcgctctgatgattagccatatcggtacgcatataaaaattgccgtttcccgacagggtattggtggtcaacgtaatgaaattttccgcacttgccgtcactgatgaacgagtcactggctcatccatcataatcacatttgcgtcagacatcgcaaggttggctaagttgaggagggtgttttggttcgtcgtagtgatatcggcaatgatggtccatacgctattttcgagcgaaacgtccgctttgctggtatccacggcaccatgcgttctaaaagaagcgccctcagaaaccactaccttacccaccaacattgcgggtgcataatttatttgcggcttcatgacctcaagaatgccatcattccctctgactgaaacgttaaccattgtgccagcccagacgttagcgcggccattgttgataaccatattttcagagatggcttttgaggaatacgtgatacttccattctgatatgatcgaccgagatcatataccgcatttgcctgcactttcgtaccagtatcctttcccagcgattgcatagtggcatgcttatcaaggatagtatcaatggcctgcgtgtcctccataacaatgagcccggaaccatcatccagttcataattttttgacgcaccatcttttatactaaattggcctttactgtttggaccactcacttccagcgcattcgttgagacaattaattttccgcctgcttttttatcaacgccagttacagtcccgccatccataacctccagtaagccgccactatctacagtggtattataagcgaagtcattttcttcaactcgcaaacttccgccgttttccaacaacatattattagcaataccattcttgatatcgaactgaccgagacggtttgttccgaatacctccatggcccgcgtggttgttttaatagcaccgcctgctttctgatctaccgcaaatgcaaatcccccctctttaacctccagtagtcctcccttttcgatagcgacaaagacggcccccccatctttttcaacgattaagcgcccgcctttaatcgtggtatcattcgctgcgccataaacctgtagcacaccattattgagcgtagtctggtttgccgcgccacccatttgaacaatttgataaccgtcatttaatactgagtattctgcggcgccattcatttcaatgtactgataccctccgttaatttcagtattattacttacaccaaattcttttatatgctgttctccgccaggattgattttcgtattattggcggtcccataaaccagctggatatctttttccaggacaacaccatcaactgtctcaccatactcaacagttgatgccaatgctatgggtgaatataacgctgtagccaccagaacagatattgcggaacgacaaagagaaacagaaccagattgatgcattgagctttcatcctatgaaattaattgctgttaaaagcattgggtacagaaaatacccatagctccatacccggagtcagtttttaaaaactgtttaaagaaatgcacaagtattgtgattgattttttagttgtttttcttgatgagaagctgatgcaaaattccgtctttataatgaaaatgatgccaaagcgaacgacaaggttgtagttttcactacatgtccatacataaaatggggtaacattcacgcgcctggtagcgttaccaacgctacgctcaaacataatgattctaataaaacctcaggagactactatgcctgaagcaacgccttttcaggtgatgattgtggatgatcatccacttatgcgacgcggtgttcgtcagttactggagcttgatcctggctttgaagtggtcgccgaagcgggcgacggcgcgagcgctatcgatctggcgaatagactggatatcgacgtgatcttgctggatctcaatatgaaaggtatgagtggcctggatactctcaatgccttgcgcagggatggcgttaccgcgcaaattattatcctgaccgtatccgatgcctccagcgatgtctttgcgctgatagacgcaggcgcagacggttatctgttgaaagacagcgacccggaagtattgctggaagcgattcgtgccggagcgaaaggcagcaaagtctttagcgaacgcgtcaatcagtacttacgtgaacgtgaaatgtttggcgcggaagaagatcccttcagcgtgctgacggagcgcgagctggatgttctgcacgagctggcacaggggctgtcaaataaacagattgcctcggtgttgaatatttccgagcagacagtaaaagtacatattcgcaatctgctgcgtaaactcaatgtccgctcacgcgtggcggccaccattctgttcctgcaacaacgcggggcacaataaaaatagcccgatggatttatcatcgggctgagatttatgacaaacgcaaaactgcctgatgcgctacgcttatcaggcctacgtggatcgatcaatttattgaatttacacaattttgtaggccggataaggcgttcacgccgcatccggcataaactaagcgcactttgtcaacagtctagcccgatggcatcaccatcgggcctctttttatttactctcctgcggcgacaaatgttgcatcgcctgcgcgatactacgttcaatcaccgcacggcgagtatcgttggcaggtaagagtttcaacatcatctcccacgcggcaacggcttcgccaaatcgctgctgctcaaaggcattaaacgcatacatgcttagcacacggatattgctatggtccgttctcaccagctgacgtagcagttcaccgccgaggcggttgtcgttgggatcagatgaacgagtcaacgcttcagcgtatcccagtgcagcatcactgtttttcggatcgaggcgacacgcagtggcgtatgcatcggtggcgatactggcgttacccagcgccatgccaacgcggcccaacataatccagccttctatatctcccggatttttttgcagttgagtacgcatccccagcgcaagacgcgacatctcttcttcgttgagcggatcggctttcggatccagcgccctgtccagcaacgccggagcctgtgccgtggcctgctgccagattttcacctgctgataattgccagtctggtagtagctgacgccagccacaattaacgccaccacaatacccggcagataaacaacatatccggcacgcttaccttccggcacgctttgttcaggaaacgcttccggcaccacgcgtacccgacgccgcgagcgggcgtatatgacccaaccgccaatgccaatagccactactggcagcacccacagcagcacggtcagcggcgttaacggcggatcgtaagtgacgaagttgccgtaacgcgccaccatataatcgacaatctcttttttacttttaccttcctgcatcagttcatacactttctgacgcaggtcggtggcaatcatcgagttggaatcggcaatgctgttgttctggcatttcgggcagcgcagttcttcagtgagctgacggaactgttgttcctgtgcttcatctttaaactgcaacacatcgatggtcgccagcgctgagccggagatcatcagcatcagcacgcccaataaaaacctcattgtgcggcctccttactgtatttctcccacagcggcttgatctcttcttcccagacgcgaggattcagatcgcccgcatggcgatagcgaatgatgccgttgccgtcaataagaaacgtttctggcgcgccatagacaccgagatccagccctaacatgccatcgccatcaaacaggcttagcgcgtaaggattgcccagctctttcagccagctgattgccttctggcgatcgtctttatagttcatgccgaccacgcggatgccctgcgcagaaagctgattcagatattgatgttccgcacggcaggtcggacaccaggtcgcccagacgttaagcagtactggtttgccctgagtcagcacatccgcctgataaaactgccccggattgtccagtgattcgagacgaaacttcggcacaggcttgccaatgagcgccgattccagattggtcggatcatccccttcggcattacgcgccagctgccacagcagcgccgcggcaatcgccaggaagataatcaacggaattaacaatactttgcgcttcatacggcctccggcgcagttttttgcggactcacgcgcttacgatagcgaggatcaaacagacacagcagtccgcccaacgccatcatcagcccgcccgcccaaatccagcgaacaaatggtttgtagtaaagacgcacggcccacgcgccgttttccagctcttcaccgagggccgcgtacaggtcacgcgtgatgccgccgtcaattgccgcttcggtcatcatcgacccggcagtgttgtaataacgtttttccgcatacagcaccgtttccggcttgccatcgcgcgttacgccgatagtcgccacaccgccacgccagttcgggccagtcacctctttgacatcacggaaggtgaagcgatattcatgaatatcgacgctatcgccggacttcatgcgcacatcacgctcaacgctatagttctggctaaaggcaatgccaacaattgtcactgccagcccaaggtgagccgccaccatcccccaataactgaaggtggttttcgtgccgcgtgaaatacgtagcgcagcttccgcaattgccagcaccgcaatccagcaggccattgccaggccgagcaccgtcatcgccacaactttgctttcgaacagccacggcaacagcagcgacagcaccagcgtagagatgaaggcgataatcaataaattgcggatcttacgcgggcgatcccgcccccagcgcaccagaggaccgacaccaagcagtagcgcaaacggcaccatcagccaggtaaacatggtgttgaagaacggttcgccaatcgaaatactgcccagtcccagttgcttatgcaccaacggcagcagcgtccccagcaacaccaccagcatcgcagcgaccagcaaaacattgttcgctaacagcaaagattcccgcgaccacagcgcattgtttacgcgtgagcgaactttgtgtccacgcgcggcaaacagcagcagcgaaccgccaatcaccagcaccataaaggcgaggataaacataccgcgcgccggatcagacgcaaacgcgtgtaccgataccagcacgccggaacgcacgaggaaagtccccaacagacacaacgagaaggcactgattgccagcagtaatgtccacgctttgaagctggcgcgttgttcagtgaccgccagtgagtgcatcagcgcagtccccaccagccacggcataaacgaggcgttttctaccggatcccagaaccaccagccaccccagccgagttcgtaataggcccatgcggaaccgagcacgatgccgagcgtcaggaagatccacgctgccagcgtccacggacgagtaaaacgcgcataagtgctgtccagacgcccgctcagcaaagaagcaatggcaaaagcaaacgccaccgagaaacccacgtaccccatataaagcagaggcggatggaagatcagccccggatcctgcaatagcgggttaagatcgcgaccttcaatcgggaagttcggcaacgtgcgagagaacgggttagaggtaaagagaatgaacagcaaaaagccgacactgaccatccccattatcgccagtacacgggccacaatatccagcggaatacgctgactaaaaatcgccaccgcaaaggtccagccgctcatcagcagcacccacagcagtagcgagccttcatgcgcgccccaggtagccgccacgcgataccacaccggaagctgggtattggagttgctggcaacataggtgacggtgaagtcgttgaccacgaaagcattgaccagcaccagaaatgcgccagccacagacataaacagcagccaggcaaacaagcgggaagacgccatcatgcgcgcatctccgcgcgccacgccccatagcggatacacggacagcagcagcgcaattcccagcgccaggcacagcagtccgttaccaatttctggcatcatgatgctgggtccttataaacactcgccgggcgacggtggttagcttccatcgctttctcaacttctggcggcgtatagttttcatcgtgtttcgccagcacttctttcgcgaggatatgattgcctttttccagttcgccctgcaccacaacgccctgcccttcacggaacagatccggcaaaatgccttcgtaagagacatccactgagccttcagcatcgtaaatggtgaaggtcactttcagcgaattgggatcgcgctgcacactacccggcatcaccatcccgccaacgcgcagacgctgaccgacttccggcatttgctgagtttcacgcttgccgtagagaatttcccccggcgtataaaagagatcgatattcgagcgcagcgcatatagcaccagaccgatagtcagcgccagccctgccaacacggcacaggcaatccacaagcggtttttacggcgaatattcatgcagcctcctgctgttgcgcagcacgtaaacgcgcctcacgcgcccgctgttgcgccacgccacgcagaattgcgcgatgttgcatcaccgagtgcacgaccaaaaccaccagcggaataacggtcatcaccaccgccagccagacaaaaaaggcgtaaccgcccattgcgaaaaattcattccaggaagcaaatgcaggggtcatttacggcctcttttcagtatcagttcactcacccacggacggcgtttttccatcagcaaaatcaaattacgcatccgcatcagcgtcagcgtggcagacaggagcaggaagccaaaaatcgaccagcgcagcggcgaacgcatcgccggatcgatactttgctgcatccgcgttgatccctgatgcagggtgttccaccactccacggagtaatgaataatcggcagattcaccacgccaatcagcaccaggatacctgccgcacggcccgccagacggcggtcgtcgaaggcgtgccacagggcaatcacacccacatacaaaaacagcagcaccagttcagaagtcagacgtgcatcccatacccaccaggtgccccacatcggttttccccatgcagagccggtaaccagggcaataaaggtaaacacggcaccaatgggggccatcgccgccaccgccaggttggccattttcatctgccagacaaggccaataaacgctgccactgccattgatgcataaatgcccatcgaccagatcgccgcaggcacatgcaggtagataatgcggtagctatttccctgctgataatcagccggagcaaagccgaatccccagatccagccgacggtaagcacgaccacactggcaattgccagccacggtataaaccagccacagatttgatacagccgtggtgggatcgccagttgatgcagtgttttccacatagtttcgataccagactcgaacaaaaatcagtaatccagcgttattgaatgctgattcgtaacgctgccgccgtcgcaaaaggacttaatgtcgcggtgcctgccagcaacgcgcctaaaattgccagatacccgtcaacgggcaaatgcatagaagccgcgtccatcgcggcggtggcaaagatgagtaatgggatagtcagcggtaacaccagtatgctgagcagcacaccaccgcgcttaagtcccactgtcagcgccacgcccggtgcaccgagaaagccaagcgtaggcgttcccagcagcagcgtcagcgccatcacttgccagccataaacatccattcccagtagcattgctaccagtggcgaaaggatgagtaacggcagaccggttaccatccagtgcgccatcaccttcgccagcacaacggcgggcaagggtaacggcaacaacatcaattgttcaagactgccgtcctgcaaatcgtcacggaacagtcgttccagcgccagcaaggatgaaagcagcgcagcaacccagataatgcccggtgcaatacgcgccagcagttgcggctccggaccgatactgagcggaaaaagggtaattacaatcaggaagaaccacagcgggttggcgatttcggcgctatggcgaaacgctacacgcagctcaagacggaaaatgcgccagaacatcatgcggccctcgtttgcgtcagtgaaatgcggcgaattttactttcagcaacgttgagcggctggtgggtagtcagaatcacaatccccccctgctccgtatgctgcgccatacgctgggtcagacgatcgacaccgttaacgtcaatcgcggtaaaaggctcgtcgaggatccataacgtggcacgggtcagccacagacgcgctaaagcgacgcggcgttgttgcccggccgagagctgatttacaggaatatcttcgaatccggcaagcccggcctgcgccagggcttccagacattgtgcggtatcgccatcgcgatgataaaagtgcagattttctaacgccgtcagccgggttttgatccccggctgatggcctatccataacaggttttgatggtagctgtcgcgtacctgatgcaagggctgcccttgccagagaacctcgcctgcgtcagggcgagacaaccccgtcagcaaacggagaagcgttgtcttccccgcgccgttgctaccggtgatttgtacccactctcctgcgttcagcgtaaatgacaagccactaaataaggttcgttcatcccgctcacaaagtaactctctggcttcaagcatacccacgcaataaccctgttaaaaacctggctcgacttcacgcatatcgggcagcttgtgcgctatccctttatggcaatcaatacaggtttgcccatctttcaccgcctggtcatgcatcttcgcggcaaccgatttctgggcggttgtatccatatactcgaagttgtgacagttacggcactcctgcgagttattgtccttcatgcgccgccactcattctgtgccatcgtcagacgatgagcttcaaatttctgcggcgtgtcaataacgccaaaaattttaccatacagctctttacttgctttgagcttgcgtatcatcttcggcacaaactcgtgcggaacgtgacaatccggacaggtcgcacggacgccgctacggttgttgtagtgcacggaatccatgtattcctgatacaccgtgttgcgcatttcgtggcagctaatgcagaactcttcggtattggctttttccatcccggtgttaaagccaccccagaagacgatgccgccaacaaaaccgatcaacagcagcgtccccagcgccagacggctgggggtacgccaccatttccacaggcgcttaatcagaccaggcttacggtcagaatttcccataataacctcttatttcccgtaaccttttgatggggtaaaggtattccccacgattggcgcggtatcggcctgcggtacgtgacattgcagacagaaataacgacgcggagccacttccgcgcccactttgccgtcgctgtccataaagtgagtaggactgatacgcggcgcgccagtggtgcgatagctttcgacaccgtggcactgcaagcagcgattggtattggtcgttacctgataaccttcaacgctatgcgggatcattggcggctgattcacatagttcagcggcatccgatcctgctcttttggcatccgaatggccccttcctgtgtcccggatacttccggcgactggctaaaatcgacgccattagccgcccaaaccgcgccgcttaccaccagggccagcatcgccgtccattgacacagcgctttcttcaggtcatggcttttcatgatttcgctcccgaactccatcgtgtagttattgtaaatacatcctcagaacagacatccacgcagcgaccgcacgtcatgcaatcgcggctggtgacctgcaccgggctttgttcatccagcaccggggcacgtagcacatgcggttccgggcaaacatgaaaacaatccatacagcggttacatttctgccgatcggtggccgcaacggtaatcacacctttgctacccagcacgccatacagcgcgccaaccggacaaatgtgcccgcaccagccgtgttcaacgaccagtagatcaaataaaaacagcgcgagaataagcagcgcgccgctgccgaagcccattaccaggctacgccccatcagagaaacggggttgatccattcccaaatgagcgtgccagttaaggctgatcccaccagaatgaccaccaacagcacgtagcgaatgtggcgagggatcgtcgcagactgattgaggtcaaagcgcctgcgtaaccagttcgctaagtcggtaatcgggttcagcgggcagacccagctgcaaaataatcgctttcccgccagggcgtagagcacggtgataatcaccgcaccggtcaacgccaccgtggcaggcagatgaccactggcaagactttgcagcgtcatcagcggatcggtcagcggaacggtgtcgaataacaggctactgctgtagttgccgtgcaagatccacacaccaaaccatggaccgctcaaaaacatccccagcacgaagaactgacaaaggcgacgtaacaccagccaacggtgactgcgccaccagccttttttctccagcgcctcgcgcccggcgtcacgtttacgatttgccattgttcccctccagccagccgaagcggtaatggtgacctaactcccctttcgccagtgacagcggtaacaccttgattgccggttgttccagcacgcatactttttcgcacttaccgcaaccggtacaggcgtcgctgtgaaccgtcggcagaaagcgggcgtgcttaccggtacgcgtgttgcgctccagctccagggtgatggcctcatcaattttcgggcattcgcgataacaaacatcgcagcgcagcccctgaaagttgagacagttttcctggtccaccagtaccgccagccccatccgcgcgtcgtcgatcgattcaatctcacgatccagcgcaccgcttgggcacactttggcgcacggaatgtcctcacacatttcgcaaggaatatcccgtgcgacaaaatatggcgtgcccgccgacagaccagaggccagcgtcgccagttttaaggtgtcgtaagggcaagcctgaacacactgaccgcaacgcacacaggcactggcaaaggcgttctcgtttatggctccgggcgggcgcaaccgcacgccagatgcgcgtgcggtttgctgttgtaaccccagcgccacacccacggcagccagcccgcctgctgtgcgaacgacatcgcgcagaaagcggcggcgaccattttgaggtttcgctgaccgggacataatggcttacaccttctccagtttgaccgcgcacttcttgaagtccgtctctttcgagagcggatcggtcgcatccagcgtcagtttgttaaccaactgtgcggcgtcgaagaacggcatgtacaccaggccctgtggcggacggttacgaccgcgcgtttcaacaatcgagatcacttcgccacggcgagaaaccactttcactttgtcgccacggcgcagatcgcgcgctttcgcatccagcgggtgaataaacaggaccgcttccgggaaggcgcggtgcagttctggtacacggcgagtcatactgccggtgtgccagtgctccagaacgcgtccggtagagagccacaggtcgtactcttcatccggtgcttccgccgccggttcgaatggcagtgcgaagatcaccgctttgccatccggtttaccgtagaacttatagccttcgcccgctttcacgtacgggtcgttaccttcgctgtaacgccactgcgtttctttaccgttcaccaccggccagcgcagaccgcgcgctttgtggtagtcatcgaacggtgccagatcgtgaccgtgaccgcgaccaaaccatgcgtactcttcgaacagccctttttgcagatagaagcccagctcgcgggattcatcgttcagctgatcttccgccagttcggataccgggaatttgctcacttccggtgtggcatacagcacttcgtacagcgttttgccacgcagttccggtttcttcgccagcagatcttccggccatacttcttcagttttgaagcggcgggagaactggactaactgccagagatccgatttcgcttcgcccggtgcctgtacctgttgacgccagaactgagtacggcgttcggcgttaccgtaagcgccctctttctctacccacattgcggtcggcaggatcaagtcggcggccagcgcactgactgtcggatacggatcggagacgatgatgaagttgcgcggatcgcgccagcccggcatacgctcttcattgatgttcggcccggcctgcatgttgttggtacacatggtccagtaaacattcagtttgccgtctttcagcgcacggtcttgtgccaccgcgtgcagaccgattttcgccggaatggtgccgctcgggatattccacttcttctcgcagatatcacggtgtttctcgttggtcaccaccatgtccgcaggcagacggtgagcaaaggtgcccacttcacgcgcagtaccacacgcagaaggttgcccggtcagggagaacggaccgcaacccggctgggaaattttgccggtcagcaggtgcaggttgtagaccaggttgttagcccacacgccacgagtatgctggttgaagcccatcgtccagtaggagatgactttcttgttcggatcggcatacagctgcgccagttgttctaactggtctttcggcacgccggtcatttcggcagttttttccagcgtatactcggcaacgaaggctttgtaatcttcaaagctcatcggttcggaggcgtcagaacccggattcttcgctgctttttccagcggatgggtcggacgtaaaccgtagccgatgtccgtcgcccctttgcgcaggttaacgtgcttgctgaagaagtcctgatttatcgcattgttttgaatgatatagttggcgatgtagttcaggatcaccaggtcagattgcggcgtaaagatgatgccgttatccgccagctcgaagctacgatgctggtaggtagaaagcaccgccacggtgacgttctggttagagagacgacggttagtgatgcgcgaccagaggatcgggtgcatttccgccatgtttgcgccccacagcacaaacgcgtcagcctgctcgatgtcgtcatagcagcccatcggctcatccataccaaaggtacgcataaagccaactactgccgacgccatacagtgacgcgcgttcgggtcgatgttgttcgaacggaagcccgctttaaacagcttggacgcggcataaccttcccagatagtccactgaccagaaccgaacataccgatcgattccggccctttttctttcagggcggttttgaatttctcttccatcacatcgaaggcctgatcccaggtgattggggtaaattcgccttctttgtcatattgaccgtttttcatacgcagcagcggctgcgtcaaacggtctttaccgtacatgatcttgggcaggaaatagcccttaatgcagttcaggccacggttaaccggtgcgtccgggtcgccctgacaggccaccacacgcccctgctgcgttccgaccagaacgccgcaaccagtaccgcagaaacggcacggcgctttatcccatttgatggcttcctgctgaccaacaacggcgcgggcaacgcccggcacgctgagaccggcagccgccgcagcggccgcaacggcgttagctttcataaagctacgacgactgagtttcatggtgtttcctcaccttgctcttcctgctggtgataaaccagcgacaccgccagcacgccctctacgttgcgtactgactcaatggtttggatcagcgtttcgctgtcttctgcttccaccaccacaatcaactgaccgctcggcgcgtcgctgacagcaacttcacagccgggaaaggcgttcagttgggtgctgatgtctgaaattcgttcgcttttggcctgcacgaccaggctgcaaacttgccagttagtgtgcatggagatactccgcagttatggctgataccggacagctggctgcacatgctccacatccgttgcaaagttggctattaagttgcggctggtagatcccggagagcgtcgggcgaaagataattgccattggctcacagctatcctgacagcggcggcattcaactgactgatacgccaggcacgcgtccccaatggtgaactgcaaatcccaggccctggtgtggcgcggagaaaatagcgattcggggcaagcctgcgcgcaggcgtaacagaaactgcactcgttatttttgaaattaacgctcggatagccgcccgcgccgcgttgcagaatgttgttttcacaagcattaatacaggcgtcgcagcgggtgcaatgggtcagaaaatgagattcatcaccggaccagggcggacggataccgttactggctttgcgccagcgaccagtgagtatgccccgacgggatgcatcaatcttcacattgaccttccatcattaacgcgctctgaaaattgagagcgaccaaataaaccgcataattaataagccatttttatagccgctaagatattaaaggatgtgtcaaagatgcataccccgatcggggtaaaacctgtagcaggatcaaaagagtggcgggaagcgtggcaaaaacgggcttttgctcacatttcaaatggttataaacatatttatatagcgattaattcaccagagatatttctgctggtttgttctctcatcagaatttaacactaaaagagcaggtgaaattgtctgaatattctttaagttactcataaagcaaattaataaatctgatgaatatgttaaccttcagcgacatcatcggtgaaaacctataaatgaagaaggaaagcaaaaaaatgaagaccattctacctgcagtattgtttgccgctttcgctaccacttccgcctgggcggcagaaagcgtccagccactggaaaaaatcgcgccttatccacaagctgaaaaagggatgaagcgtcaggtgattcagttaaccccgcaagaagatgaatctaccctgaaagtagaactgttaatcggtcagacgctggaagtcgattgcaatttgcatcgtctcggcgggaagctggaaaacaaaacgctggaaggctggggctatgattattatgtctttgataaagtcagttccccggtttcgacgatgatggcctgcccagatggcaagaaagagaagaaatttgtcaccgcgtatctgggcgatgctggaatgctgcgttacaacagcaagctgccgatcgtggtgtatacgccagacaatgtagatgtgaagtaccgcgtctggaaggcggaagagaaaattgacaacgcggtagttcgctaaactgccgtgaagtgcggcaccccgtaggtcagacaaggcggtcacgccgcatccgacatccaacgcccgagccggttgcctgatgcgacgctggcgcgtcttatcaggcctacaccgctgtgaagtgctccaccccgtaggtcggataaggcggttacgccgcatccgacatctaacgcccaagccggttgcctgatgcgacgctggcgcgtcttatcaggcctacaccgctgtgaagtgctccaccccgtaggttggataaggcggttacgccgcatccgacatccaacgtccgagccggttgcctgatgcgacgctggcgcgtcttatcaggcctacaccgctgtgaagtgctccaccccgtaggtcggataaggcggttacgccgcatccgacatctaacgcccaagccggttgcctgatgcgacgctggcgcgtcttatcaggcctacaccgctgtgaagtgctccaccccgtaggtcggataaggcggttacgccgcatccgacatctaacgcccaagccggttgcctgatgcgacgctggcgcgtcttatcaggcctacaccgctgtgaagtgctccaccccgtagattggataaggcggttacgccgcatccgacatctaacgcccgagccggttgcctgataagacgctggcgcgtcttatcagcatacgccacatccccggcataccatgccggatgtggcacatcattacaacgcaatacccgccacttctttttgaacgggtttcggtttcaactgcggtttcggcgtactatctgctgcctgcggcttgtcgtatttcagccccagcacttcgctggtgtactgcaactcgcgttctgttgccgctacatcaccgttcagcttgcgtccataagacggaacgatcgctttcaacgtagcctgccattgcgggctggaaacgcgatcgccaaatactttttccagcagatccaacataatcggcgcggcggttgacgcccctggcgatgcccccaggagcgcggcaatggtcccttgctggtcactgacgacttcagtacccagacgcagtacgccacctttctcggcatcacgcttgataatctgcacgcgctgccccgcttgccacaaacgccagtcctcttttttcgcctgcggatagtactctttcaacgcttcaaaacgatcctcttcactcaacatcacctgactcaccagatatttcaccagatcgaaattatccagcccgacgtgcatcatcggcatcacgttagaggtggtggtggaactcatcagatcccacaatgaaccgtttttgaggaatttggttgagaaggtggcaaatggcccaaacagcactacgcgtttaccgtccagaacgcgggtatcgatatgcggaaccgacatcggtggtgcgccaacggatgctttaccgtaaaccttcgccagatggtgattaaccacgtccgggttttccgaaacaaggaactgtccgcccaccgggaaaccggcgtagtctttcgcttccggaatccccgattcctgtaacagcttcagcgccgcaccgcccgcgccgataaagacaaatttggcacgaatgttctgtgcagtgccatttttcagatcggcaacggtaacggtccaggtgttatcgtcattacgctttagggcgcggacttcgctgctgagttgcagcgagaagttagatttcttctgcaaggaagcaattaactggcgggtgatctcgccgtagttcacatcggtaccaatttccgtacgcgtggctgccactttctgttgcggatcgcgcccttccatcactaacggtgcccactctttgatctgcgcgtgatcttcagagtaacgcataccgcgaaacagcgagctttgttgcaacgcggcgtaacgggcgcgcaggaaattaacgttatcctcgccccagacaaagctcatatgcggaacggtattgataaatgaacgcggagtacgcagcacgccgcgctcaacctggtgcgcccagaactggcgggaaatctgaaatgcttcgttaatggcgactgctttttcaatactgatgctgccatcggcgttttgcggggtgtagttcagttccatcagtgcagaatgcccggttccggcgttattccagccgttcgaactctcctgcgcgacaccctccaggcgctccaccatggtcatcgaccattcaggctccagctcgcgtaaataggtccccaacgtggcgctcataatgccgccgccaatcaacagtacatcagtttcctgctcctcagacgctttcgcttttgccgccatcgaaacggcattaagccccacggccatcgagaagagcatggcagtcacttttttcatcttgttaatgccttacttttagtcgctttattgcaggtgagatttgcgcggcatcaacggtaacacttaagtaacaacatttaaataaagtttataaattatattctaattttagaaacattataatttcgttgattaattatagggttattagaaatgaagggatttttagcatattgacctgacggcagcagtccgccaggtcagcgtcgtaatattatgccgtccgggcaacggcatcacgcgaagcggcatcgcgctcttcgcccgtcagctcgctaagttgcccattgcgcatttccagcaggcggtcggcgtggataaagtaatgatcatcatgactgatagcgaaaatagttttacccatctcctgcatcagcggcagcaacacctgataaaactcacgacggaagtgtggatcctgatccgccgcccattcatccagcaggataatatcgcgttcttctgccagcgccagcaacagcgccacgcgttttttctgcccttttgataacttcaggttaacaatacgcccgttgcttaactcaagcttatgagccattttcagctgcgccagccacttctcaaccagttgcgggttagcgggtttaccctccggccccagcagttgatcaaacagccagacatcggtaaacactgccgaaaacagtttgcgataatcttccggttgttcgccactgacaggtttgccatccagcaagatttcgccgctttgtggctggtacaagcccgtcagcaacatcgccagcgtcgattttccactaccgttgccaccaatcagaaacagcagctcgccacgtttaatggtgaggttaatcggcccaacggaaaacgcgttatcctgatagctaaacgtcacgttacgcagctccagcgtttgccagttgggaaacgcctgcgggcgcggaaactcagctttgaaaggcgcgagcgcgaatttgttcagcttgttaaacgccacctgcgccgtcagcagcgtcggcaatgcgccaaccgccgaaagcagcggcgtacgcaggaataacagcgtcaacgaataggtcgcagcaacgttggtatcagcccaaccgagactgttcgccatccagaacaccaggccgatagcgcccagcatcatgatgtttgaccagttcacggcgctaagatggaaggtgtctgcgcgaataatatgatggcgatactcttgcgcatcggggatgtagaggttgttaaacacatactcggcgcgttcccggttcagagtcagctctttgcgcccttcgagtacggtttgaaaatccgtgtacagcttgtcttcggtttcacgcagggtcgccatatgtttgtacacccgcgccaccagtacaaaaccaccccagatggtgatcgccatccagatagccgttaccagcaacattttgcccgacagcatccacagatacgccgcggaaccgatagtgagaatgatcccctgcaccagttccggaagacgcacaaaagcaatggtgatattgcgcacatcgctggttaatcccgccagcaacgaggcgctaccgagttgttcaatgcgctcgacgtgggtatccagaatccgcttgataaattcactacgcagtcggtaaacgaagtgatgccccaaagtggtgagcgccagttgcgatccgagagtgactgccatcaacagcagtaataatccaagaaactccggcaacaccagcagactggtatccgccgtttcgataaggcgctgattgataaaagcaattaagccaatgcctaatgccgcactggcgaggcttagcgccatcacactgataaatggccagcgatactgccgccagacaagtacaagaagttccatgcagaaaacccggacaatgaattacagcccgcagtttaaacatcttcgcgcgcacagcaataataattcttatttttattcttttttacctgcctgacggaatgtcaggttgtagcggcagtcggtggtgagtggatgaaaccccgctttcaacggttgaataccgtgataaaacagccgcgattcaccgccccataccaccacatcgccatgttccaacaacaaacgtttgagcggatcattacgtttcaggccgccaaattgaaaaatcgcgggtaagcccagagaaacagaaacaattggcgcgcgcagatccggttcgtctttatcctgatgcagcgacagtttcgcgccaggagcgtagcggttgataagacaagcatctggctggaaatctggatagcccgccgccgtagccgcacgttgacataaattatgaaaactctgtggcatggcgggccacggtttatttgtttgcggatcaatgggcgaatagagataaccttgccgatggctcgtccagcccagatgcccacagttggtcatcgccaccgacatggtatatcccccgggggtgaccatctggcgaaacggcgactggctggcaacgtcattaatatcgcggattagttgctccgcagcgttaaaagcaaaacgccgtaaaattaccgctccagccgccagtggctcttgccacggttcaccatcggcaaacagatccaacattacctctcctcattttcagcttcgcggcgcagcagttgcgctttacgcgacacgccccagcggtaacctgaaagcgatccatcaccgcgtactacccgatgacagggtataacgatagccagcttgttggcggcacaggcacttgcaacggcccgtaccgctttcggtttgccgatggcgttagccagttgctgataactgacggtttcaccgcaaggtatcgtgcgcagtgcctgccagacttgttgctgaaaagcagtgccgcgaatgtccagcggtaacgtcagcggcgtatcgcgttgattgaggctggcgatcacttcacgcacatgttgctgaaacatcagatcggcaggcgcgttgtcggcagcgggaaacatttgttgcaactcgctgattaatgtggcgtcatcatcgcccagcaatatcgcgcaaatcccccgctcgctttctgccaccaggcaacgacccagctcacaatcagccagcgcgtaacgcaccgccagattttcgccaccgtgacggaattgtttagccgtcatgcccagcgtttcatcggctttgcggtagtaactgctgctgtcggggaatccggcgttaagaatagacgtcgtcacgctctcccctttcgccagcgattcgcgcaaacggcgagcgcgccaggcctgttgccaggctttaggcgtcattccggtagtcgctttaaacaaccgatgtagatgaaatggactcatcgccacctggtcggctaaggcttccagcgttacaggcgtttcctgttccagcagtcgacacgcgtgggtgattttatccaaccgatgttgccggggattggctttgtctggctgacaacgtttgcaggggcgaaagccagcggcgagtgcctcactggcatttgcgtagaaggagacgttttcccgcaaagcatgtctggcgcggcaagacggacggcaaaagatgcctgtggtacgcacggcgaaaacgaattcgccgtcggcattcgggtcgcgggctaagacagattgccagcgttgatcgtcagttaagcatgtggcttttttcataatcagctccctggttaaggatagcctttagtctgcccggtcaccatcacgcaaaaaccaacaatcttgcgctttaatttttttcgctgacaaggaagcttttaaactgtggtgacatccaggttttaaagctatcgccttctttggtgatcatataaaccgccagcccttcccggcgaacaacctctttggctttctccggcccgagtaccatcaagccagtatcccaggcatcggcttccagcgccgtcggagcaatcaccgtcacggataccagattgtgttcgatgggacgcccggtttgcggatcgataacatgggaaagacgtttgccgtccagttcgtaatagttacggtagctgccagaggtgctaatcccatgaccgttgatatccaccacagcctgaaccgcgttttctttatcggttggtttttgaatcgctacccgccacggctggccttcaccgttcataccacggctgttcagcgcgccgcccaccgacaccagatagcgggaaatcccttcctgctccatcaagcgtgccaggtgatccgccgcataaccttcaccgacggtggagagatcgacatataaatccggcaggtctttttgcagatattgctgatgcgactgattaatgaccgtcaggtgctgtaagccggttttggctttcatcgcatcaatctgttcctggctcgggatttgtaccggctgttgttccgggccaaaaccccacagattcaccagtggcccgacggttatatccatcgcaccatcggtccttgcgccaatgcgcagcgaggtggtgacgatatcggccatcgcttcacttaccggccacggcgacaaactttgcgagtcgttaaagcgcatcagcgcggaatcttttttataggtcgaaagcagctgatcgtcggcgtccagctgggtctgaatcttttctttaagttcggcactgcgtttggcatcaatgcccgggatgctggcacgccagaaggtacccatggttttgccttcaagaacggtaacttcagtagcgtgggttttggcgggttgtggtttttgatcgcaaccaacaaagaagagcgcggcagccagcagtgccacgcgggtaaagcttatttccatacgtgattatcctcatgcgaacggtcgcaagagtacaccaaaaaactgtgtttgtacgctgaaaacaatgaaaaaagggcccgcaggccctttgttcgatatcaatcgagattagaactggtaaaccagacccagagctacgatgttatcagtgttgatgccagcgtcacgagtgaactggttgtcgtccagcaggttgattttgtagtcaacgtaggtggacatgtttttgttgaagtagtaggtcgcaccaacatcaacatatttcaggatatcttcgtcgtcgtagttacgaccattgatgacacccaggtttttacctttagactgcaggtaagccagggacggacgcagaccaaagtcgaactggtactgagcaacagcttcgaagttctgtgctttgttcgcccaacccagggaacctacgcgagttgcgttgtaggtctgggtgtactgagcagccaggtagatgttgttagcgtcgtatttcagaccaccagtgtaggtttcagcacggtcgccagtaccgatgtagttacgaactacaccattgctggtgtagctaccattttgatcatcagtacgtttggagctggaaactgcagcaccgataccgaagccttcgtaatcataagtgatagatccgccgacaccgtcgccattctgacgcagagcaccacgaccattgttggtcatgccttcgccgcttacgctaccgtttttgccctggtactgaacagcaaagttcagaccgtcaaccagaccgaagaagtcggtgttacggtaggtcgcgaagccgttaccacgctgctgcatgaagttgtcagaaccgtaggtgtcgccaccgaattctggcagtacgtcggtccaggaagttacatcgtaaacaacgccgtagttacgaccgtagtcgaaagaacctacatcctggaatttcagacctgcgaatgccacacgggtccaggagttttctttgttgtcttcagaggtattgccctggatctgatattcccactggccgtaaccggtcagctggtcagtaacctgagtttcgcctttgaaaccaagacgtacataggtctggtcgccgtcttctgacttgttgtcagagaaatagtgcaggccgtctactttaccgtacagatctaatttgttgccgtctttgttgtaaacttcagcagcgtttgctgcgcctgctaccagcagagctgggaccaggagggacagtactttaactttcatgttattaaccctctgttatatgcctttatttgcttttttatgccactgcatactgattaaccctcattaatcagtcggcaagtccattctccccaaaaatgcagaataatccaacacgaatatgatactaaaacttttaagatgtttcatttatcgctatagatgtttcaaaatgtaaatgcaagggaactttttaagattattgcggaatggcgaaataagcacctaacatcaagcaataataattcaaggttaaaatcaataacttattcttaagtatttgacagcactgaatgtcaaaacaaaaccttcactcgcaactagaataactcccgctatcatcattaactttatttattaccgtcattcatttctgaatgtctgtttacccctatttcaaccggatgcctcgcattcggttttttttacccttctttacacacttttcattattctgtgctaccacataaaaactataacgcttgttaactatttcacaaataattaacatcagcataatttccagcaatctttgtttatttgcaattattttcgttgggctttttgtaggttatttgtacagcaaaatggcgcttgtacatctatttcccccaatgcaggatgataaatatcacgggagaatagagaatcatcaatcaggtaagagtctggaatttcacactgtaccctttatactgccctatcacttcgcgaagttttaacaggtcataaacacgaatgcgtcagaaagagacaacggccacgacccgcttttcactcctaccggggagcattacccgcttctttttactgttgatcattgtgttactggtgacgatgggtgtaatggtacaaagcgccgttaacgcctggctgaaagataaaagttaccagattgtcgacattacccatgctatccaaaagcgcgtcgataactggcgttacgtgacctggcagatctacgacaacattgccgcgacgacctccccctcctccggcgaaggtttacaagagacgcgcctgaaacaggatgtctactatctggagaaaccacgccgcaaaacggaagcgttaatctttggctctcacgacaactcaacgcttgagatgactcagcggatgtccacttatctggatacattgtggggcgcagaaaatgtaccgtggtcgatgtattacctgaatggtcaggataacagtctggtgctgatctcaaccctaccccttaaagatctcacctccggatttaaagaatcgaccgtcagcgacattgttgattcacgtcgtgcagagatgttgcaacaggccaacgccctcgatgaacgcgaaagcttttctaacatgcgccgcctggcctggcagaacggtcattactttacattgcgtactacctttaaccagccaggacatctggcaacggtcgtggcttttgatctgccgattaatgatttgatcccaccgggtatgccgctggacagtttccgccttgagccagacgcgacggcaacgggaaacaatgataatgagaaagaagggacggatagcgtcagtatccactttaacagtacgaagattgaaatctcctcggcactcaactctaccgatatgcgcctggtctggcaggttccttatggcaccttattgctggatacgttgcaaaacattctgctgccactgctgctgaacatcggtttgctggcgctggcgttatttggctataccacattccgccatttctccagccgcagtacagaaaacgtccccagcacggcggtcaataacgaattgcgcattttacgggcaatcaatgaagagatagtctcactgctgccgctcggcctgctggttcacgatcaggaatcgaaccgcactgtcataagtaacaaaattgccgatcatttgctgccgcatttgaatctgcaaaacatcaccaccatggcggaacagcatcaggggattattcaggcgacgatcaataacgagctgtatgagatccgcatgttccgcagccaggtcgcgccgcgcacacaaattttcattattcgcgatcaggatcgcgaagtgctggtaaacaagaaactcaagcaggcgcagcgtctgtatgagaaaaaccagcaggggcggatgatctttatgaaaaacattggcgatgcgctgaaagaacccgcacagtccctggcggagagcgcggctaaactcaacgccccggaaagcaaacaactggcgaatcaggcagatgtgctggtgcggctggttgatgaaatacagttagcgaacatgcttgcggatgatagctggaaaagtgagacggtgctgttctccgtgcaggatttaattgatgaagttgtgccttcagtgttgcctgccatcaagcgtaaaggtctgcaactgctgattaacaatcatctgaaagcacacgatatgcgccgcggcgatcgcgatgccttacgacgtattttgctgctactgatgcaatatgccgtgacctcaacgcaattgggaaaaatcacccttgaggttgatcaggatgagtcctccgaagaccgcctgacgttccgcattctggacacgggagaaggcgtaagtattcatgaaatggataatttgcacttcccgtttatcaaccagacccaaaacgatcgctatggcaaggcggacccgctggcattctggctgagcgatcaactggcacgtaaactgggcggtcatttaaacatcaaaacgcgggatgggcttggtacacgctactctgtgcatatcaaaatgctcgcagctgacccggaagttgaagaggaagaagagcgtttactggatgatgtctgcgtaatggtggatgttacttcggcagaaattcggaatattgtcactcgccagttagaaaattggggtgcaacctgtatcacacccgatgaaagattaattagtcaagattatgatatctttttaacggataatccgtctaatcttactgcctctggcttgcttttaagcgatgatgagtctggcgtacgggaaattgggcctggtcaattgtgcgtcaacttcaatatgagcaacgctatgcaggaagcggtcttacaattaattgaagtgcaactggcgcaggaagaggtgacagaatcgcctctgggcggagatgaaaatgcgcaactccatgccagcggctattatgcgctctttgtagacacagtaccggatgatgttaagaggctgtatactgaagcagcaaccagtgactttgctgcgttagcccaaacggctcatcgtcttaaaggcgtatttgccatgctaaatctggtacccggcaagcagttatgtgaaacgctggaacatctgattcgtgagaaggatgttccaggaatagaaaaatacatcagcgacattgacagttatgtcaagagcttgctgtagcaaggtagcctattacatgaacaatatgaacgtaattattgccgatgaccatccgatagtcttgttcggtattcgcaaatcacttgagcaaattgagtgggtgaatgttgtcggcgaatttgaagactctacagcactgatcaacaacctgccgaaactggatgcgcatgtgttgattaccgatctctccatgcctggcgataagtacggcgatggcattaccttaatcaagtacatcaagcgccatttcccaagcctgtcgatcattgttctgactatgaacaacaacccggcgattcttagtgcggtattggatctggatatcgaagggatcgtgctgaaacaaggtgcaccgaccgatctgccgaaagctctcgccgcgctgcagaaagggaagaaatttaccccggaaagcgtttctcgcctgttggaaaaaatcagtgctggtggttacggtgacaagcgtctctcgccaaaagagagtgaagttctgcgcctgtttgcggaaggcttcctggtgaccgagatcgctaaaaagctgaaccgcagtattaaaaccatcagtagccagaagaaatctgcgatgatgaagctgggtgtcgagaacgatatcgccctgctgaattatctctcttcagtgaccttaagtccggcagataaagactaatcacctgtaggccagataagacgcgttagtgtcttatctggcatttgcaccgattgccggatgcggcgtaaacgccttatccggcctacgattcccattatttcaacaaattacattaaagtaggccagataagacgcgtcagcgtcgcatctggcatttgcactgaatgccggatgcggcgtaaacgccttatccgtcctacgaatcccgcgatttcctgaccctctcggcatataacgtcagcgtctgttttatcacatccagcgttaccggcttcgacaggcagctgtccataccggactccagacaccgctgcttctcttcagccaacgcattagcagttactccgattaccggcaacgtcagtcccaactgacgaatgcgttgcgtcaagcggtaaccatccatatttggcatgttgacgtcgctaagcacgatatcaatatgattcttgctaagtacattaagcgcatcgacgccatcattcgcggttttacattgatagcccaacgatcccaactgatctgccagcaaacgccggttaatcggatgatcatccacgacaagaatcatcatatcgtcattatcgctgaccgctttgtccgttgacggcagagcgttagcaggatcgtcgctctccatctcgatcaaataaatacgcgccaacaatgccggtagctcatgcggagcagccacactgtgtacccactcccctggcgctttctccagcggaataccaatatggcgacgacagaaggtcactaccgctctgccctgccattttttactcactacctcgtcagtgatcaacacatcttcgggagtcggttcctgcccttcgtatgttgtaacgacgatgccgctgcgctgcaaactggtttccaggaactgacagagcgacgcattgcggaccgccagccagcagcgtttaccactcaacccttccacgccttttttctgcgggtactgagcgccgtacaacggaatacgcacggtaaactggctgcccattcccggttctgaatctaccgagatatcgccgtccatcatgctgatcagtttttcacaaatcgccagacccagaccggtcccctggaaattacgctgtacgcccgttccgacctggaagaagggatcaaacaagcgcaccacttctttcgccggtatccccacgccggtatcgcgaacacggatagagagataatcgccatccgcgcgaacatgcaaaactatacagccggtatcggtgaattttatggcgttactcaacaggttggagatgacctgctgtaaacgcatcgggtcgccatttaaggccactggcacatccggttcaataaagcagtacaagcctaactgcttgcgtaccaccagcggtaaatagttggcggtgatgtggttcatcacttcacgcggtgaaaactcacgcggttcgatcttcaactgttccgattcaatcttcgagaaatcgagaatatcgctgataattttcaacaacaggctggaagagttgttcattgccgtcaccagccgatcgacgcctttcggtaactctttggtttgcaacagatccaggttaccgataatgccatacagcggcgttcgcagctcatgactgacggtggcaaggaacatcgattttgactggctcgcctgttccgctgcttgtgccatctcctgcaacgactcttccatcttcacgcgcgaagaaacatccaccagcacacaaatggccacgttttcattacgatagcgcgaatggacgaagctgatttgcagattggtattgttgctggtcaggacatcaacaaaattgacctgctgcccacagataatttgcgtcagtcgttggcggtcctcatgcgtaagcatattgagataggtatgcgccagttcgttacttaaaatattgacgccatcagcggtacgcaaaatgcagatacccactggcgcggaggcgacaatcttgcgattgaactgctcatgttcttccagtcgcagggcgtcgctttccgccggaatgaaaatacgtcgctcgtacatccgtgcgagagtaaacaatgcagctccggcaagcacattcagcaaaattgcgttaaggatcaacatgcgaatgcgttccagcaccttatcaaccggcaccgaatacacgatgcttagcgatgagggtggcagatttttcttcagcaccagctcccggaacccttccgtatagccaaaccaggagcgttcctgcatccagcgaggatcgcccttaattttactttctggtccggtaagcgaaatcagggtatgaccattttcatcaagaatggtaacccccatcggcaacgtacccggtaagaaaaagttttccatccggatggtctgctcgacacccaaaagcgcctgcaaccggttcgccagataaactggcgtcaacgcgtaaaaatacccgacgccagggcgcggaccttcgctgatccagtagaggttactgccgctatcatcttgtggtgcatttcgatatttattgatgcgttcatgcaaagctttcaacgcggtatcgcgttccactggcatatcacgcagaccgaaattggccatgcagaggttatcactgccgattaaaaatacccggttgagatcgtaagccgcagaaaaattatcgcgccagtagcgcataaaccacgccaatgactccagagaacctcgccaggtgttactcatcgcggaacaatcggagtcggcaaacagcggttcaaacgcaggcacatccgcctgcgtttctcgtccacgcggggaaagcacaccgttctctgccgataagcgattttcggcgatgtacttcagctctttcatcacatcagaggtgcgttgaataaagcgctgagcctgatcggaactcagattaaattcctgacgaatttccgattctcgctgatgtaacgcattaacgatgtaaaaaacggatgaaaaagcaatcaacagccagagcactaacgccaatgctctgaacatgtagcgcgaggctttcagggttgtacgaaaagaagcaaggtatttcaaaggggcgaagctccgcctcaggtgaccgatggagtgtggttaaggtagcggtaaaagcgtgttaccgcaatgttctctcttctctggaatatgatacaccgccgagaaatcatcaccttaacctctgataatcgtcatataccggacaagactagtggatttcagcatgcattatatgaagtggatttatccacgccgcttacgcaatcaaatgatcctgatggcaatcctgatggtcattgtcccaacgcttactattggttatatcgtagaaacggaaggacgttcagcagtcttatctgaaaaagagaaaaaactttctgccgtggtcaacctgcttaatcaggcgctaggcaatcgctacgatctctacatcgacttaccgcgtgaggagcgtatccgcgcattaaatgcagaacttgcccccattaccgaaaatatcactcacgccttccctggcatcggcgctggttattacaacaaaacgctggatgcgataatcacctacgcgccttcagcgctatatcagaataatgtcggcgttaccattgccgcagatcaccctggtcgcgaagtcatgcgtacaaatacccctttggtttattcaggcaggcaggtgcgcggcgatattttgaattcaatgatccccattgagcgtaatggtgaaatcctcggctatatctgggccaatgaattaaccgaagatattcgccgccaggcctggaaaatggatgtgaggattatcattgtgctcaccgccggtttgctgataagcctgctgttgattgtccttttctcccgtcgcctgagcgccaatattgatatcatcaccgatggcctctcgactctggcacaaaatattcccactcgattaccacaattgcccggtgaaatggggcaaatcagtcagagtgttaataacctcgcccaggcactgcgtgaaacgcggacacttaacgatctgattattgaaaacgctgccgatggcgtcattgccattgaccgccagggtgatgtaaccaccatgaacccggcagcagaagttatcactggctatcaacgccatgaactggtagggcagccttactccatgttgttcgacaatactcagttctacagtccagtactggatacgctggaacatggcaccgaacatgtggcgctggagatcagttttccaggtcgtgaccgcaccattgaactcagtgtcactaccagtcgtattcataacacgcacggtgaaatgataggtgctttggtgattttctctgatttaactgcccgcaaagaaacccagcgccgcatggcgcaagcagaacgcctcgccacactgggtgagctgatggctggcgtcgcgcatgaagtacgtaatccgttaacggctattcgtggttatgtacagatcttgcgccaacaaaccagtgacccaatacatcaggaatatctgtccgtagtactcaaagaaatcgattcaattaacaaagttattcagcaattgctcgaattttcacgtccacgccacagtcaatggcaacaagtcagcctcaatgcattggttgaagaaactctggtactggtacaaaccgccggcgtacaagcgcgggtcgacttcataagcgaactggataatgaattaagcccgattaacgccgatcgtgaactgctcaaacaggtactactgaatatcctgatcaatgccgtccaggctatcagcgcacgagggaaaattcgcattcaaacctggcaatacagcgactcacaacaggccatttcgatagaggacaacggctgtggcattgatctctcgctgcaaaaaaagatcttcgatccctttttcaccaccaaagcctcaggaaccgggcttggtctggcgttaagtcaacgcatcattaatgcccatcagggtgatattcgcgtcgccagtttgccgggctacggcgcaaccttcacgcttattttaccgatcaacccgcagggaaatcagactgtatgactgctattaatcgcatccttattgtggatgatgaagataatgttcgccgtatgctgagcaccgcttttgcactacaaggattcgaaacacattgtgcgaacaacggacgcacagcattacacctgtttgccgatattcaccctgatgtggtgttgatggatatccgcatgccagagatggacggcatcaaggcactaaaggagatgcgcagccatgagacccggacacccgttattctgatgacggcctatgcggaagtggaaaccgccgtcgaagcgctacgctgcggagccttcgactatgttattaaaccgtttgatctcgatgagttgaatttaatcgttcagcgcgctttacaactccagtcaatgaaaaaagagatccgtcatctgcaccaggcactgagcaccagctggcaatgggggcacattctcaccaacagcccggcgatgatggacatctgcaaagacaccgccaaaattgccctttctcaggccagcgtcttgattagcggtgaaagcggcaccgggaaagagttgattgccagagcgattcactacaattcgcggcgggtaaaggggccgttcattaaagtcaactgcgcggcgctgccggaatcgttgctcgaaagtgaactgtttggtcatgaaaaaggtgcatttactggtgcacaaaccttgcgtcagggattatttgaacgagccaacgaaggtactctgctcctcgacgaaattggcgaaatgccgctggtactacaagccaaattactacgcattctacaggaacgggaatttgaacggattggcggccatcagaccataaaagttgatatccgcatcattgctgccaccaaccgcgacttgcaggcaatggtaaaagaaggcaccttccgtgaagatctcttttatcgccttaacgttattcatttaatactgccgcctctgcgcgatcgccgggaagatatttccctgttagctaatcactttttgcaaaaattcagtagtgagaatcagcgcgatattatcgacatcgatccgatggcaatgtcactgcttaccgcctggtcatggccgggaaatattcgagagctttccaacgttattgaacgcgccgtcgtgatgaattcaggcccgatcattttttctgaggatcttccgccacagattcgtcagccagtctgtaatgctggcgaggtaaaaacagcccctgtcggtgagcgtaatttaaaagaggaaattaaacgcgtcgaaaaacgcatcattatggaagtgctgaaacaacaagaaggaaaccgaacccgcactgctttaatgctgggcatcagtcgccgtgcattgatgtataaactccaggaatacggtatcgatccggcggatgtataacaccaaaacttgctatgcagaaatttgcacagtgcgcaattttctgcatagccgctcattctccttataaacccccatccaatttatcccttcatattcaattagttaaataactaaatccaataatctcattctggcactccccttgctattgcctgactgtacccacaacggtgtatgcaagagggataaaaaatgaaaacaaaattgatgacattacaagacgccaccggcttctttcgtgacggcatgaccatcatggtgggcggatttatggggattggcactccatcccgtctggttgaagcattactggaatctggtgttcgcgacctgacattgatagccaatgataccgcgtttgttgataccggcatcggtccgctcatcgtcaatggtcgagtccgcaaagtgattgcttcacatatcggcaccaacccggaaacaggtcggcgcatgatatctggtgagatggacgtcgttctggtgccgcaaggtacgctaatcgagcaaattcgctgtggtggagctggacttggtggttttctcaccccaacgggtgtcggcaccgtcgtagaggaaggcaaacagacactgacactcgacggtaaaacctggctgctcgaacgcccactgcgcgccgacctggcgctaattcgcgctcatcgttgcgacacacttggcaacctgacctatcaacttagcgcccgcaactttaaccccctgatagcccttgcagctgatatcacgctggtagagccagatgaactggtcgaaaccggcgagctgcaacctgaccatattgtcacccctggtgccgttatcgaccacatcatcgtttcacaggagagcaaataatggatgcgaaacaacgtattgcgcgccgtgtggcgcaagagcttcgtgatggtgacatcgttaacttagggatcggtttacccacaatggtcgccaattatttaccggagggtattcatatcactctgcaatcggaaaacggcttcctcggtttaggcccggtcacgacagcgcatccagatctggtgaacgctggcggacaaccgtgcggtgttttacccggtgcagccatgtttgatagcgccatgtcatttgcgctaatccgtggcggtcatattgatgcctgcgtgctcggcggtttgcaagtagacgaagaagcaaacctcgcgaactgggtagtgcctgggaaaatggtgcccggtatgggtggcgcgatggatctggtgaccgggtcgcgcaaagtgatcatcgccatggaacattgcgccaaagatggttcagcaaaaattttgcgccgctgcaccatgccactcactgcacaacatgcggtgcatatgctggttactgaactggctgtctttcgttttattgacggcaaaatgtggctcaccgaaattgccgacgggtgtgatttagccaccgtgcgtgccaaaacagaagctcggtttgaagtcgccgccgatctgaatacgcaacggggtgatttatgattggtcgcatatcgcgttttatgacgcgttttgtcagccggtggcttcccgatccactgatctttgccatgttgctgacattgctaacattcgtgatcgcgctttggttaacaccacaaacgccgatcagcatggtgaaaatgtggggtgacggtttctggaacttgctggcgtttggtatgcagatggcgcttatcatcgttaccggtcatgcccttgccagctctgctccggtgaaaagtttgctgcgtactgccgcctccgccgcaaagacgcccgtacagggcgtcatgctggtcactttcttcggttcagtcgcttgtgtcatcaactggggatttggtttggttgtcggcgcaatgtttgcccgtgaagtcgcccggcgagtccccggttctgattatccgttgctcattgcctgcgcctacattggttttctcacctggggtggcggcttctctggatcaatgcctctgttggctgcaacaccgggcaacccggttgagcatatcgccgggctgatcccggtgggcgatactctgttcagtggttttaatattttcatcactgtggcgttgattgtggtgatgccatttatcacccgcatgatgatgccaaaaccgtctgacgtggtgagtatcgatccgaaactactcatggaagaggctgattttcaaaagcagctaccgaaagatgccccaccatccgagcgactggaagaaagccgcattctgacgttgatcatcggcgcactcggtatcgcttaccttgcgatgtacttcagcgaacatggcttcaacatcaccatcaataccgtcaacctgatgtttatgattgcgggtctgctgctacataaaacgccaatggcttatatgcgtgctatcagcgcggcagcacgcagtactgccggtattctggtgcaattccccttctacgctgggatccaactgatgatggagcattccggtctgggcggactcattaccgaattcttcatcaatgttgcgaacaaagacaccttcccggtaatgaccttttttagttctgcactgattaacttcgccgttccgtctggcggcggtcactgggttattcagggacctttcgtgatacccgcagcccaggcgctgggcgctgatctcggtaaatcggtaatggcgatcgcctacggcgagcaatggatgaacatggcacaaccattctgggcgctgccagcactggcaatcgccggactcggtgtccgcgacatcatgggctattgcatcactgccctgctcttctccggcgtcattttcgtcattggtttaacgctgttctgacggcaaccctacagacagaaggaataaaaaatgaaaaattgtgtcatcgtcagtgcggtacgtactgctatcggtagttttaacggttcactcgcttccaccagcgccatcgacctgggggcgacagtaattaaagccgccattgaacgtgcaaaaatcgattcacaacacgttgatgaagtgattatgggtaacgtgttacaagccgggctggggcaaaatccggcgcgtcaggcactgttaaaaagcgggctggcagaaacggtgtgcggattcacggtcaataaagtatgtggttcgggtcttaaaagtgtggcgcttgccgcccaggccattcaggcaggtcaggcgcagagcattgtggcggggggtatggaaaatatgagtttagccccctacttactcgatgcaaaagcacgctctggttatcgtcttggagacggacaggtttatgacgtaatcctgcgcgatggcctgatgtgcgccacccatggttatcatatggggattaccgccgagaacgtggccaaagagtacggaattacccgagaaatgcaggatgaactggcgctacattcacagcgtaaagcggcagccgcaattgagtccggtgcttttacagccgaaatcgtcccggtaaatgttgtcactcggaagaaaaccttcgtcttcagtcaagacgaattcccgaaagcggattctacgactgaagcgttaggcgcattgcgcccggccttcgataaagcaggaacagttaccgccgggaacgcgtctggtattaacgacggtgctgccgctctggtgattatggaagaatctgcggcgctggcagcagaccttacccccctggctcgcattaaaagttatgccagcggtggcgtgccccccgcattgatgggtatggggccagtacctgccacgcaaaaagcgttacaactggcggggctgcaactggcggatattgatctcattgaggctaatgaagcatttgctgcacagttccttgccgttgggaaaaacctgggctttgattctgagaaagtgaatgtcaacggcggggccatcgcgctcgggcatcctatcggtgccagtggtgctcgtattctggtcacactattacatgccatgcaggcacgcgataaaacgctggggctggcaacactgtgcattggcggcggccagggaattgcgatggtgattgaacggttgaattaatcaataaaaacacccgatagcgaaagttatcgggtgttttcttgaacatcgacggcgaaggtaaccccattaatcaccagtcaaaacttttcaccagcgtcagctcgccagcattacgcatcggtacaataaatgtttcctgtttctcattgaccgatccttcatcggtgatcagcgtcagttgggcggtggttaattccgtttcgctgcgcccaccatagtagttgatatacacctgatagcgcccgtgaattggcgcgggcatggcgaaaatctcgggtccgtaccccgtcgtgacatccatatccagtgcaccactgtttttcagcacggtgttaccgtaccaggcgtgttcgccatcgggcgtaacaacgtgaaggtcgaggtcggtattgtccgtatcccacgagagaaccagccgtaaacgtgcacgaatcgttcctgtacccggcgttgagtaaaactgcattttttgtcggctttgcccatccgggctgatgacctgcacgctgttgctgccttcagtgaaaatataagggcgtgcaaatgaaccatcggattcaattctctgcggcatactggcaccgttgaccaccagccggccctgctgaactttacccgccgcagcataattctttattttgccgcggatctgcgctgagatattttgatcatctgccatgttgacggacgacgccgggtaattgatcgattgtgaaaaactggcatcttcgccctctgccggatgccagcctgagagcggtgcatcaatctcgacttcctgcacaccttcactgtgagcgacaggcgaaagcgccaccagtaacaacggaagaaaaatctttcgcatagcattagtccattaataattgtcgggtcagcgtttcgatatagttctcatcaagcccggtgggataaccatcaaaggccaggtgcagatactcatgggttaaatccagccgatcctgaagcgtaaagaagttacgaataaacagccgtttctgctgccgatcggtataggggaaacctgagactaaacggcaaaccgcaaacacgtctggttcgttgtaccccgtctcagcttgtaatatacgccgccactgcggcatttttttcgccagccaggctttcgctttgggtaataactggcaggttgagcgtggcgctccccagcggctaaggctgttgtcgggataagcaaacgcgagtatctggtcgtaacgctctccctgccccgcctgggccgtggcttgccgccaggaaagtgtcccttcggtagcgcgactgccatgataatgaaccggatcgcctgcatagatgagatcctgcgtccaggcggtcatcgttcgcgcccccgtggtcgctggcgaagcagaaacacgctgcgtggcgctgctgtcggggatggtcaggcaatcgccttcccgattggcgttttgctgtaaaaaagtgcgaatcgccacggtcatggctttcgctgcctcagggggcgtacttttcgcctcgcgatccagaactctggcaacgtactcttcacgatcgagatgcgactgcaatttcagtttgcccttttcgctcagtaaggtcgtctcaccgtggctgacaaacgtaatgtggttaccattagtaaacgtcacacgatagcgcccattaagtacgccgggatttactgccgtcgtactcttttccgctgtgattttcttcagcggatagcgggcaaacagctccacctctacacattgcccactggcaacctgcgtcggcactggcaaaacccgattaagcaccgtcgcataacgggttagtaccgttttgctggtgccactgccagtaacccacagcggtgtaccatcggttaaccagccagcaaaaccaccctgacggatttcctgtttatcatcggcaaaccagctccaggttttcacccgtacccgactaccgagcatggatgcgacaccgattttcgcctcgtccagcaccacatccagtaagacttcctgagctttgttttgcgcgggtaacgtcgctaatgaatcaagcagcgatttaaccgttaccgaggtttctggcttcagcgtagtcagagacgctaaccacgcaggtgcctgacgctgttgccagtattgcccccacacatctgcgccaatatgcaaccgctgcggcgcaaaatagagcccacaggaacgtaccagcgcggtatcgcgcgttatgctctccccagcctgacaacaataaacctcttccggggagtttccgcgacactggtagggctgctccggttgatgggtatcctccagccaggcgtaaacatacagtttccacaaactccctaacggcgtggtgagcgagtcaggtaatgctgagactttggtcacgcctgatgacgacagctgatacagttgatcgtgctgcgcaccgcgcagcaccagttgtaacggcgtctcctccgcaagtgttggcagagtaaccaacgccaatagccagacgattctgcgccagttcacttatttcacctgcatcccggtccattcactccctgccgcaacactttgctgcgcaggtgcataggaacgcacataacgagcaggaggcagaacgaattgccctttttgcgagaagcgcagcaaatggcggaaagtgaccgttcccgtcagttctttcaccggcaccatataggccagttcgcccatttcattacgcgctttttccagcaattgcccctgctgtttcgcggcgttgggtttattgactgaaatgccccatgttgtgcgctcaacgtcggctcccggcgggagcggtacttccacctgaccatagcgcagaactgcatcctgctcgctggtaagcgtaatttcatcgagatacagcgcatcgctgtcaatctcattgctggtcaccggctgcagagtaaagctcatctcttcttcaccggggataagccgatacaactggcgttcaacggtcaccggaatgttactttgttgagccgtttttgccggttcacgccagcggacctgcacattttgcggcgataattcgtcaccaaaagagagaatgtccggcacaccctgaccaacccaacgccagtcttcgccccctccagttaacttatgtttagcccatgcgcccgcaggcgcaggcaaaacaactggaggcattgtcgccatatatttcgccagccagttcatggccagcgcgcgctcaatagtggattgctcagcggtcaaaccacttaaaatagcggccgtctgggtagcgtcgccaccgctattaagcagcacaaccgtgtgcgccagcggctgattgctgtttgccgctttatcccacgcatattgctgaacctgtggcatcaccgtggacttcaactgcgcttttttcagcaacgtcatggttaagacgtttgccaccgcatctgccagtggagactccggtgtatcgaggatcaggctatcattgatatcgcgggtgtcttcctcagagaaatcttcagttttagttccgcgccgggcgatagcttcatccaaccctttcaacaacgttttgcacggcaaattcatctcctgcgcccatgccagcaccagcgcccgatgcaataacggcatgttatctgcctgctccgcgtagctgtcgagcatatgctgccagtattccggttgttgcgttacgccgatcgcctggctggcctgccagtcggcgtaccatgcccatgccgtaaggaaggcgtcaccattgccatcttcaccccaccaggtaaagcgcgctccgggccccgccagttgcatcagccgcagacggttatcctgaatcatctgacgaatgtcgttagcggcggcactttgatgatcggcaagcgaacgccaggcgagactgagcgggatcagacggctaccggtgttgattacgccaccccacggttcatcgactaacgcatcaagattgttgcggaaaatctcctgcggcgtttcactactttgtagccggatattgctcgcctgctcgggcaacatcagcgcgttatcgccaccaccgagcatgacatttttctgctgttcaacgggccagctgttatccacaaaagacagttttgtgctaatgctgtcctgcacttgcccattttgttgcagttctgcacttaacaagccagattgctgaatattctgcgtcagcgaaatataattcgcccctttgtgcagcgtcagcgtctggcgcatctcagcgcctgcaaatttagtcaccagcgccaccggttcgttatcctgctgactgaagataaacagtcctgccgccggtttgtcgcccacgcgatacaccgttggcatactccacttcatgtagagatttttttccgaacgcagataagcacgcccctgcccgaccagcccgtcgccgttcatcccacgcgcggtgatacgccagcgggttaacgaatcaggcatcaggaacgtgaaatacgctttgccttgtttatcggttgtgagtgacggcatccatgccgcggtatccacctcttcacgccgtggacgttcaagcatttttactcgccgctcgctgcggttagttgcgccaggcgcaaccggctcgctggagagcgcctggtcgtagctgataaacgacagactggagctggtacgcacattgttacgccccagcggatagaaaaatttgccgatattcggcgcgatttctggttgcagcgcgtagatcatttcatcgaccacgcctaccgttagctgcgcagaaacaggtttacctttcagcgacgaggttaattcgacattgaccagttcaccaggctggtaatgggttttgtccgttttcacccggatatcaagctgaggaacggcaactttgatcccggcgttctgaaaactgtactgaccattacgggtatacagcaccgaaaaagtgatgttaggcgcaaaggaattgctcactggaacccgggcttcatactgggtatcgtttaaacgttgtagcgttagccagtttgccggatgcgaaagcagcgactgctgttccacgcgatcgcgttccagcgtcaataatgcttcatcaattggctccggaaaggtaatcagcatcttcgcggtttcgcctggctggtacagcgttttatccgccacgatatctaccgtaccagtatgcgccgtgctgcccttaccgctgacggcatgacttaacccagcgagaattaagccgtctttatcgcgtaatgtcagattgtagttgccaggtttagcgaaattgacggtaaaggatttgccgcctgacggtagctctccgctatggctcgtgcggtcttcgagacgcaaccattcatacgtaacaggaacctgttttgaagattccagcgcggcataacggaacacaaccgactcgccgctattactgtattgtgcggcggtacttaaagagtaatgcgccagaccgcgttcaatgaggatctctttggtggtggtgacgcgatacgccgcgccgtcactggcggagacggttaacaaatagcggctcggtttatcggcggcggggagatttaacgccacatgaccgctggcgtcggacaccgtttcgctgccttccagcgacacggggaaacgtccggcataacgcaaatcgttaccgaccattgataattgctgagcgcgcaaacttaactgcacgcgggcattttttaccggctcgccatccgggtagagcagttgcagtttgccgctgaccgcttcgccagttttgaactcttttttggcgagagctaaaccaatctcgaaatgtggcttgatgtagtttgccacgcgaaaactgctgctatagacctgattgcggtaagcaagacgtaactcataacctccggctacggcattttctggcaggcggaaacttccctgcccgccattgcgcgcatccagcgtgacattgacggtttgcaacagactgccgttggcgtccagcaccgaaagcttcgccggggcgctgacgatgggggatgaatgcaacggatcgtggaactcgcggccgatcactttaacatcgacacgatcgcctgcgcgatatagcgggcgatcgataaaaatatacaagcgggtgttgtagatttcgctttcgtagaagaagttctcggagacaaaaacgccgccttcagcatccttacccagaatgtatgaacgttctggcgatatatgttgtaactgcaaggtaccgctgtcatcggtcacaccgcgggtcatcacgccaagaccgtcagtccacaagatctctgagccgggcttcgcttcaccctgttttttacccgcggtccacaccagaagctctttgcctgacactttgctaagcgccacggtatcggaaacaaacaccaccgtcgtcgcccgatacccaccaaccatcgcctcgacgaggtacagtcccggctcttgttggccgagaggaatataaatgttacccggctgcggcgagatgaaattgctggatgcgccttccagttttaccccttgctgcggctcgaacggtttagcctgccatagtggataacggaactgtttcaccaggggatattttttcagcggggaaaactggttgttctgtacataacgggaaggtttaataatggcattgccgagctgtaattcgggtaacgcctgagtcacattctgccgtgactgagaagagaaagtacgctgcatcacgcggcgagatttgccgtaccagttatcccacagccaggttagcgtattgttcagcccgtcgcccagatattgcggttgcaccacaatgcgatgcaggtttttctgctggcgcaaaaatgccatcgggtcaggaatacgatacaggcgaacgtccacgccgccgtactcttccatctgatagcgccgataatcacgccccggcgcttccagtcgcactttcgcctcttcactgctgctaaaactgctgtcagcaagcaaaaagaatgttcccccggcaggcggcgcatagttgctggaaggaagcgaatcatcagcattagcaagccctgttcccacaagagacagggacaagcacgctgctatcgcgccagaaaatttaaacgataaatgccaatgaaattgggattggaatcgttgggtatccatcgggtgtccttccatgtcataagttgttgcagactgactgcgcgcattccgttgtcagttttcgtggcgcttccggtgtggtagatgacgtaacgccccatccagaccattaagtgctggacatcgccctgatcgaaaaaaatcatatcgccaggcagcgcctggtttatgtcctggccaataaactggctgttgtactgaatcaaattaatcgcggtcacataggggccggttttcccgttcccctgattccagttttgcgccagttgacgctgttcaggtgttagcgtcatctctggcggcaaatactggctagataaaccgttactttttagccatttactgtcgtgaactttcagcgtctcgttcgccgcaaatcgcaccaggcccgcacaatcctgctgataccagcgtggacttggcccctggcggagctgttcttgtgcaatgcgtacaaaccaggcgcgaaacagcccggattgttcgacattcagcatttcgctatgggcaacaacacaacacagccagcaaatcagcgccagcagcccgtgcctcatagcggctgccaggttatgggtagccactgccaggcggcaccgggttccatctgggccagcttcatgacataacgcggttgttgagataaagcgtccagcttcggcattaataaagtttgtgcggcgttataaaaaaccggttcgagattcttcggcagactggtcaacgtttcgttacgcagcagtttcgctattccttgtggattgatatagagcggaacgatgccatcagtgggtattacatccaccattgccgggcgggttttattcagtgtttgcagcgcgttattaaccagcgtgtcatcgagggagaaaagcagcgttttgttttgcatcgccagcgacacacggaaaaaataatccgacattaattgatcgggttgcgccgcctgcgctttcggatactggccgtatcgggaactcacttcgcgacgccagatttgcgcttcgccctgctgagtctggcttaccggcaaaacaccttctggcgctttgctttcgtgcgcaccaatattttgcgtaaacagtttccctggcaattgcgcctgttcggcagtgccatcaaactgaccgacaaacagcggggtttgcaattttgagtcttcataccagcacagccccgcggcaccgtctaacgccccattcagcttgtcgttttcctggctgatgtgcgaaagcatctcttcggcaataccgtgtgaatacggcaccgccacacagaagctggctccggcaggcatactgttccataccggcgtaaaatcgaaactggcatctacgctggcggattcatcatttaacgccacaaaactgtgccagccgtcgttacccatttcgaagcgtacgccagcaaaagaaggcattaaccgctggtagccaaaccccagccacctggcgctgactacgatgcgctggcgtactggcgttttttcggcagtacgctcttccaggccaaagcttgcttgccagcgttttttgccgctcaacaaatcacctgcgatcgccgtggcttcggtatcctgctgatcatctttaaacaacatatccgtgctggaaaacaccagcatcttgtcctgataagtcgcgaacatcagggcgttattgccgttatagcgcaactgataaacaggaacagtttcactatttatcttgatgctactgatttccgttttgcttaactggctgtcgctggtagcggcaaacaacaatggctccagcagtttgcttaaaccactgcgctggatcagcaccatataatgtgaaagatggccttgtttatcgtgccacagcgctgcctgcgcgggctgatctaagagtgacgaaaagagcttatctttcagcgtgagatcgtgttcatagacaatacgacgaatgctgccttcaatgcccagacgatcggcatgattctgataatagaaaacgaaatcttcgctcagaacatcgtggagaaacggaatggtgaggagatctttgggaagctggctcagagagtcgctgtcgagaaagaggtccggctcattgagatcgatttgcagattgttgtgcaccaccagcggcgacaacgttttttctggcccactgccagcatattgcaacgcccagacgccagcggaaagcagtgctattgcgccaaaacctacaagaccatagaaccgccagcctttcgcctttttttcaccactcattgccacattccttgtgtatagccagccattttttacgggcacagccaaactttaccgtgccctaatacgacaaaagcccagactttgcagcctggacttttcaattcaaacaagggagatagctcccttttggcatgaagaagtaaaattattcttcttctggctcgtcgtcaacgtccacttccggagcgatttcatcgtccccttccgcggcactgccgtcgatggtatccagatcttcctcgtcaaccggttcagcaacacgttgcagacccactacgttttcatcttccgcagtacggatgaggatcacgccctgggtgttacggcccacgatgctgatttccgaaacgcgagtacgtaccagcgtaccggcatcggtgatcatcatgatctggtcgcagtcatctacctgtaccgcgccaacaactaaaccgttacgttcggtaaccttgatggagataacccctttcgtcgcacgcgacttggttgggtattccgccactgcggtacgtttaccgtaaccgttttgcgttgcggtgaggattgcgccatcgccacgaggcacgatcagagagacgactttatcgccttcacctaagcgaataccgcgaacaccggtggtgttgcagcccatcgcacggacagaagactctttaaagcgcaccactttaccttcagcggagaacagcattacttcgtcttcgccgctggtcaggtcaacgccgatcagctcatcgccgtcaaccagtttgatcgccactttaccggcggtacgcagacggttgaactcggtgaggacagttttcttcacggtaccgttagcggtcgccatgaagactttcacgccttcttcaaactcggtcactggcaggatcgcagtgatacgttcgtcctgctccagcggcagcaggttgacgatcggacgaccgcgcgcgccacgagtggcttccggcaactgataaactttcatcgaatagacgcgaccacggctggagaagcacagaatatggtcgtgagtgttcgccaccagcagtcggtcgataaagtcttcttctttaatacgtgcggcagatttacctttcccgccacgacgctgcgcttcgtattcagaaagcggctgatacttaacgtagccctggtgagagagcgtcacgaccacatcttcctgggtgatcagatcttccaggttgatgtctgcgctgttggcggtgatttcagtacgacgtttgtcaccgaactgttcacgaaccagctccagctcttcacgaatcacttccatcagacgatcggcgctaccaagaatacgcaacagttccgcgatctgatccagcagctctttgtattcgtcgagcagtttttcgtgctcaagaccggtcagtttctgcaaacgcagatccagaatcgcctgagcttgctgttcggtcaggtagtacagaccatcacgcacgccgaactctggctccagccattccggacgcgcagcatcgtcgccagcacgttcgagcatcgcggcaacgttgcccagctgccacggattagcaaccagcgcagttttcgcttctgcaggcgtcggcgcatgacggatcagttcgatgatcgggtcgatgttcgccagcgccacggctaatgcttcaaggatatgagcacgatcgcgagctttacgcagttcgaaaatagtacgacgggtcaccacttcacggcggtgacgaacaaacgccgcgatgatgtctttcaggttcatgatcttcggctgaccatggtgcaatgccaccatgttgataccgaaagaaacctgcaactgggtctgggagtagaggttgttgagcacaacttcaccgaccgcatcgcgtttcacttcaatcacgatgcgcataccgtctttgtcagactcgtcacgcagcgcgctgatgccttccacgcgtttttcttttaccagttccgcaatcttctcgatcaggcgcgctttgtttacctgatacggaatttcgtggacgataatggtttcacgaccggttttggcgtcaacttccacttctgcgcgagcgcggatatacaccttgccgcgaccggtacggtaagcttcttcaataccgcgacgaccgttaatgattgccgccgtcgggaagtccggccccgggatgtgttccatcagcccttcaatgctgatgtcttcatcatcaatatacgccagacaaccgttgatgacttccgtcaggttgtgcggcgggatgttggttgccatacctacggcgataccggaagaaccgttcaccagcaggttaggaattttggttggcatgacgtccggaattttttccgtgccgtcatagttatcaacgaaatcgaccgtctctttttcgagatcggccatcagttcatgggcaattttcgccagacggatttccgtataacgcattgccgccgcagagtcgccgtcgatagaaccgaagttaccctgaccgtctaccagcatataacgcagcgagaatggctgcgccatgcggacgatcgtgtcatagaccgccgagtcaccatggggatggtatttaccgattacgtcaccaacgacacgggcagattttttataggctttgttccagtcattgcctagtacgttcatggcgtaaagtacgcgacggtgtaccggcttcaggccatctcggacatctggcagcgcacggccaacaatgaccgacatcgcataatccagataggagctcttcagctcttcctcaatgttgaccggtgtaatttctctcgcaaggtcgctcatctaaccgctatccctctactgtatcccggattcaaaggtcgcaaattataacacagccgcgcagtttgaggtaaacctatacgctttattcacatccaatgcctgatatactcgtttgtcttgccaattacggagtagaagtgccaatgaatgccgaaaaatcgccggtaaaccataacgtagaccacgaagagatcgctaaatttgaagccgtcgcctcccgctggtgggatctggaaggtgagttcaaaccgctgcaccgcattaacccgctgcgtctgggctatattgccgagcgtgctggcggtttatttggcaaaaaggtgctcgatgtcggttgtggcggcggcattctggccgagagtatggcgcgcgaaggcgcgacggtgaccggtctggatatgggctttgagccattgcaggtggcaaaactgcacgcactggaaagcggcattcaggtggattacgtgcaggaaaccgtggaagagcacgcggcaaaacatgccgggcagtatgatgtggtgacctgcatggagatgctggagcacgtccccgatccgcagtcagtggtcagagcctgtgcgcaactggtgaaaccaggcggcgatgtctttttctcgacacttaaccgcaacggcaagtcatggctgatggcggtggttggtgcggaatatattttgcgcatggtgcccaaaggcacgcatgatgtgaagaagtttattaaaccggcagaattgctgggctgggtggatcagaccagtttaaaagagcggcatatcactgggctgcattacaacccgatcactaatacttttaaactcggccccggcgtggatgtgaactatatgctgcacacgcagaataagtgaggttgatgtttggccgcgccaatgcctgatgcgacgcttgccgcgtcttatcaggcctacaaatgctccccgtaggccggataaggcgtttacgccgcatccggcaaccgtgccgactagacagtgattaccatttcaccgtcatcgacaaaaaccctgccgtctgggcaaaatcatcactccctttctgccacgccacgctgccgcgcagggacactcgctgactgatattgcccgtgactcccacttttatttcaccccgttgcttcaccgcatcgtcactgatagtgctgccatcctcttcaatttccgtcgaatggggatcgtgataataattcagatctaatgttggtatgacatgaacagcggtacgccattcgctgtgtaaacccagccgcgtctgaatatcatcaccctgcgattgtgacacgcgtgcacggttagcggcggtaaaatcatcctgctgcacgccctgataaatcacctgcgcctgcggttcaatcaccacaccacgccccggtaaccactgataccccgcctccagcgaggcgataatccccgacgagtggtaatgatctgtgccatcttcttgttcggaaacatcattgctaaaccacgcgtattgcagccagctatccagccaggccccttgcttctgattaccgtgctgaaaccagcttgatgtcagcccaacggcataaccgtggttctggttatcggcgcgagttccggtcatattcgagcggctgtcgccctggttatcgctgtagccaccaacaatcccaagcatccactcgccatccgtgccccagcgcccgctaaacagatcgccgctaagttgcaccgtagaagtgtcttcatgttgagccagttgccccgctgctgtgtaatgataatctccgccgataacacgtaaattcagcgtctgaccatcgccacctgcgtgatcgcgtcgctccatcataaacgcctgatttgccgcccgcaggttattgagataaccgccaactttggcattcaacaccggctggtaagcaggcgtaggttccgggtcgggtgttggatcaggatccggcgtgggatcaggatcgggagtcgggtctggatcaggtggcgatggcggcgttacttcttgcgatcgcagataccagtcgttgttatcttccaccagcgtgtagtcatacgctcccatattgacgtagccgctgcctgccagactgaactgcgcattgttttgaaactgcgtgggatcagctgcgaaatcaaccactttaatgcctgtcgatgtcggctcaccaatccctgtaatggagttaaccaccacagttgtgttgccagcagtattaccgttcatcaccaattgatcgcttaccgagtcatcgccgtttaattcgctatcgagcagtagcgtaccgccgccggtataatcaccgtttaccgtcagcgtatcgccagcgacgccattttgcaggctaaccgcaccggacgtattggtcagattgccattaaccgtcacgttggaaagataagtcaggctgtcagtttcaaggttggtattaagctcacctgtcaacgtcacaccatcggtggcattcaccagcgtcccatcgccgttaaatagtgaggcattaagggcgacggaagtatcctgcccggtcaggcgcaaaaccgtaccatcgctgatgtcgatagtgccgctggaaatagcatcaattgactgaatatcctgatccgcgccagtaacgaacgttgccccatcaccaacccacagtgacgaagcataaggaaggatatcagcaacatcacctttcagggtgccttcttcgacacgtaccgccgactgcgttgtaccgctggcggtcagctccagtgtaccagcccccgttttagtcaatgtgctaccctcatcctgatgctgcccgctgctgtcagccatcagtgcgccccactgcgtgtctacccccgcatcaactgccacttcaccgtcggcgcgcatttcaatatcacgtccgtggcctgccgcatctgaacgcgtgtcaacgtcggaggtaatctccatcacgctttcttgttgcttatcggtaaagataacctggcggttatagtgggtatctccaagctgcgagttgtcgctcaccatcagcgtaccggaggcgatttgtgttgtgcccaaataactattattgtttgccagacttacctgcccgtcgctcgcatcgaccaccacgtagacgccatctttcccgtcgccgccgatatgcaaattgtcgccacctgcaagatctaccacatcctgactgccgataaccgttccgctgctgccactgacttcaaggccatcgttgtatgatgtgccgctctgccaggtggagaaatcagagagatcgagcacaccgccgtttaacacgatcgactgcggatcgtcctggagagcggtaagatctgccgcgtcgccttccagcgaaagcaccgcaccatcatcaacgactatatcgccggttagcgccatcgactgcgcccctgccagcacgtagctgccgttttgcgcaatggtgagctgaccagcaccttcgatgatgccagcaaaactgccctgattaacagtaacgttgccaccagcatcgatatttaaagtgccattctgaaagcccgtcaatgcgtgcacaaaagtttgttgggtcgagccaacgtttagctcagcctgattctgatactgatcaatactccctatcgtcagaccgtagcagtcttgcggatcgtcctggcaatgcgtatcgccgacattcatcagggagttgctgcggcccagggtaacttcaccgttttcaatctgcatctcaccagtaaagtcattgttatctgcattaagtaccagatcgccggaacctgttttggtgattaacccggtaccagcaatagagtcaacagctccgtcattctctgtattgccaataaccagcgtttttccgtcggcaatatcaaaggtaacttcacttaagccgagatacataaagccacccgccgcagaggaaggaccatctccatagcctgctgcgctattgttctcatcgactaacacgcctccgttctggctgtagctgtcatcaacagaaatatcaataagatagggagccgtcacgctattggtatatatcgccccgccataaccttcggcagtgttatttgtaaaggcagtgttatttactatcgtataacctgaaggatgcttgctgtcgctattattatcggtaacatcgattgccccgccatcgccatcactgtaacttgttgatgtatatgcctggttgttatcaaaaataacatcacttaaataaacgtcattattaatggtataaattgcgccacctttgccatcattagcgatgttattgcgaaacatggcgttagtgacacgtaaatcgacggcaccagtatcgttagtaccagaagaatagattgcgccaccatagccgcctgcgacgttaccggaaaaaataacatcagtaagattcagcgttgagttttctttagcaaatatggccccgccgttattatattctcctgtaacggtgttattggcaaacagagtcattccagtttcattttctggtaatagtgaaaattccgctccttgttgcaaaaatacggccccaccgctggcgttattggtcatatccgaaaaaaccagccattgcccatcagcgatactccagtcctgcgtaatgcctgaaaggctttgcctgctggcctgacaactcgctttgacatcatatccctggcatgaatcagtgaccgccgcgacaccgttagcagagaaaagagatgcaatcattgacgggagtaaagataaatactccttgcgtagaaagataatccgcatattaatctaaccatcattttctataagacggcgtatttaatcgcattatacgatatggaatatctttcttttgtaaattgttcaacccggtgcaatggctattttgttattatttgatgaataatatcagtgcgtcataattcaagttaataaccttcagggatatcagttatatttaaactaaattaaagtcatgaataattttcttataatataaggtaaattaacaaaatggcttagcatttaacaataaccgaatagaaaacaaccatttcgccatcaacaatctcttacattcgcttatatattgaccacaactgatacatcagattatgtgatgactcgtgcttagatcaatttttgcaatcattagcaaaaagattaataaaccatctatatcaatttatctaacctattatgccgttcaagaaatcgccgaacagttatttttaacaaatttttctcttcccattgactttcccggacaccttgtctgacctaaggtgcgcgaaagccactttttccttcctgagttatccacaaagttatgcacttgcaagagggtcattttcacactatcttgcagtgaatcccaaacataccccctatatatagtgttctaagcagcttcccgtactacaggtagtctgcatgaaactattgcggaaagaattccaaaaacaggtacgacatacatgaatcagaatctgctggtgacaaagcgcgacggtagcacagagcgcatcaatctcgacaaaatccatcgcgttctggattgggcggcagaaggactgcataacgtttcgatttcccaggtcgagctgcgctcccacattcagttttatgacggtatcaagacctctgacatccacgaaaccattatcaaggctgccgcagacctgatctcccgtgatgcgccggattatcagtatctcgccgcgcgcctggcgatcttccacctgcgtaaaaaagcctacggccagtttgagccgcctgcgctgtacgaccacgtggtgaaaatggtcgagatgggcaaatacgataatcatctgctggaagactacacggaagaagagttcaagcagatggacacctttatcgatcacgaccgtgatatgaccttctcttatgctgccgttaagcagctggaaggcaaatatctggtacagaaccgcgtgaccggcgaaatctatgagagcgcccagttcctttatattctagttgccgcgtgcttgttctcgaactacccgcgtgaaacgcgcctgcaatatgtgaagcgtttttacgacgcggtttccacatttaaaatttcgctgccgacgccaatcatgtccggcgtgcgtaccccgactcgtcagttcagctcctgcgtactgatcgagtgcggtgacagcctggattccatcaacgccacctccagcgcgattgttaaatacgtttcccagcgtgccgggatcggcatcaacgccgggcgtattcgtgcgctgggtagcccgattcgcggtggtgaagcgttccataccggctgcattccgttctacaaacatttccagacagcggtgaaatcctgctctcagggcggtgtgcgcggcggtgcggcaacgctgttctacccgatgtggcatctggaagtggaaagcctgctggtgttgaaaaacaaccgtggtgtggaaggcaaccgcgtgcgtcatatggactacggggtacaaatcaacaaactgatgtatacccgtctgctgaaaggtgaagatatcaccctgttcagcccgtccgacgtaccggggctgtacgacgcgttcttcgccgatcaggaagagtttgaacgtctgtataccaaatatgagaaagacgacagcatccgcaagcagcgtgtgaaagccgttgagctgttctcgctgatgatgcaggaacgtgcgtctaccggtcgtatctatattcagaacgttgaccactgcaatacccatagcccgtttgatccggccatcgcgccagtgcgtcagtctaacctgtgcctggagatagccctgccgaccaaaccgctgaacgacgtcaacgacgagaacggtgaaatcgcgctgtgtacgctgtctgctttcaacctgggcgcaattaataacctggatgaactggaagagctggcaattctggcggttcgtgcacttgacgcgctgctggattatcaggattacccgatcccggccgccaaacgtggagcgatgggtcgtcgtacgctgggtattggtgtgatcaacttcgcttactacctggcgaagcacggtaaacgctactccgacggcagcgccaacaacctgacgcataaaaccttcgaagccattcagtattacctgctgaaagcctctaatgagctggcgaaagagcaaggcgcgtgcccgtggtttaacgaaaccacttacgcgaaagggatcctgccgatcgatacctataagaaagatctggataccatcgctaatgagccgctgcattacgactgggaagctctgcgtgagtcaatcaaaacgcacggtctgcgtaactccacgctttctgctctgatgccgtccgagacttcttcgcagatctctaacgccactaacggtattgaaccgccgcgcggttacgtcagcatcaaagcgtcgaaagacggtattttgcgccaggtggtgccggactacgagcacctgcacgacgcctatgagctgctgtgggaaatgccgggtaacgatggttatctgcaactggtgggtatcatgcagaaatttatcgatcagtcgatctctgccaacaccaactacgatccgtcacgcttcccgtcaggaaaagtgccgatgcagcagttgctgaaagacctgctcaccgcctacaaattcggggtcaaaacactgtattatcagaacacccgtgacggcgctgaagacgcacaagacgatctggtgccgtcaatccaggacgatggctgcgaaagcggcgcatgtaagatctgatattgagatgccggatgcggcgtaaacgccttatccggcctacggctcggtttgtaggcctgataagacgcgccagcgtcgcatcaggctccgggtgccggatgcagcgtgaacgccttatccggcctacggctcggatttgtaggcctgataagacgcgccagcgtcgcatcaggcacaggatgcggcgtaaaatgccttatccggcattaaactcccaacaggacacactcatggcatataccaccttttcacagacgaaaaatgatcagctcaaagaaccgatgttctttggtcagccggtcaacgtggctcgctacgatcagcaaaaatatgacatcttcgaaaagctgatcgaaaagcagctctctttcttctggcgtccggaagaagttgacgtctcccgcgaccgtatagattaccaggcgctgccggagcacgaaaaacacatctttatcagcaacctgaaatatcagacgctgctggattccattcagggtcgtagcccgaacgtggcgctattgccgcttatttctattccggaactggaaacctgggtcgaaacctgggcgttctcagaaacgattcattcccgttcctatactcatatcattcgtaatatcgttaacgatccgtctgttgtgtttgacgatatcgtcaccaacgagcagatccagaaacgtgcggaagggatctccagctattacgatgagctgatcgaaatgaccagctactggcatctgctgggcgaaggtacccacaccgttaacggtaaaactgtgaccgttagcctgcgcgagctgaagaaaaaactgtatctctgcctgatgagcgttaacgcgctggaagcgattcgtttctacgtcagctttgcttgttccttcgcatttgcagaacgcgaattgatggaaggcaacgccaaaattattcgcctgattgcccgcgacgaagccctgcacctgaccggcacccagcatatgctgaatctgctgcgcagcggcgcggacgatcctgagatggcggaaattgccgaagagtgtaagcaggagtgctatgacctgtttgttcaggcagctcaacaggagaaagactgggcggattatctgttccgcgacggttcgatgattggtctgaataaagacattctctgccagtacgttgaatacatcaccaatatccgtatgcaggcagtcggtttggatctgccgttccagacgcgctccaacccgatcccgtggatcaacacttggctggtgtctgataacgtgcaggttgctccgcaggaagtggaagtcagttcttatctggtcgggcagattgactcggaagtggacaccgacgatttgagtaacttccagctctgatggcccgcgttaccctgcgcatcactggcacacaactgctgtgccaggatgaacacccttcccttctggcggcgctggaatcccacaatgtggcggttgagtaccagtgtcgcgaaggttactgcggctcctgtcgcacacgcctggttgcaggtcaagttgactggattgccgaaccgttagcctttattcagccgggggaaattttgccctgttgttgccgggcaaaaggcgatattgaaatcgagatgtgaattggttgtagtgccagatacaacgcttatgcgtcttatctggcctacaacgattacatggcgtagtaatacgctttcacctgctcccagtccgctttggggattggctccagatatttttccagctggcggaagtcatgattaatcgctttatcgcgacgcaagcggcgacgacttttctccaggtcaagaaaaccagcttctgcattaccttctgttttcacatagatatggcgaacataacaacagccatgctgacgattaatgctatgcattttcttaaacgccagcgccactgctttcaacatggcttgccgtacttcgtcagaataaggcgatactgcatgctgggcataccagtcagcaatgctgatgaaccccgccatatcttcagtcaccagcaacgctcgccattcaccctcaattttcaccgcttcaccaaaaacgatcttcggcacgatgacaccggcccgttccagttctttaattaccgcaacctcacggacaatcgttggtcggccgaacggataacgtacggaatgaaacagatgatgcgtcatgcgctttacatacagctttttgccgttgcgctcgacgcattgcaccccgctcataccattacggcgatagttaggctcttcaacccagtcgccctctgttgcccaccagtgattaaattcgtcgtactttgctgaaactgccataccctatcgcctgtcatttttattaacgacaatgactataggtggttacctgaggaaaatcttaatgaaacgtgtcgtattaatgagtttcttttgccactactagcttgacaccgcttttacccttcatttgcagcgcatagattccaccagccactaccactaatagtgcgcccagcagataaaatgtgaatttaatcaggcggatacagcgatgaattttattcgacagggattaggcatcgccttacaaccagagttaacgctgaaaagcattgcaggtgaattgtgttccgttcctctcgaaccaactttctatcgacagatttcgttgctggctaaagaaaagccggtagaaggcagtccactgtttttactacaaatgtgcatggaacaattagtggcgattggaaaaatttgatatgagacaggatggcgcatgaacgccatcctgcagtaacattactctttattaagaaattttactgccttatcagggaaatcagtaaacagcccatttacacccgctttgttatacagagcatcatataactgattcacatcaggagtgtattcaggcagtttatctgaccgcacggtataaggatgcactaccagtttattctgctgagcatcttgcaccatgccagtgagtttgatattacccggctgcgatgtctcctcaatcaacatatggtaatccggaccaataccatctgcatattccgccacctgtttcatggcacccggcttaaacatccagtcgtagttgtaattaacccagcttccatccggctgtttctgctgcgtttcattccagtcggtataggcaatcagctgtaccagattgagctccatgcccattttgggttccagctcattcttaatacgcttcagctcatcagcatcaaaacattgcaaataaactttatcgtctttaccggtgtaaccatatttcttcagcacttccagcgtttttgccgcaatatccttcccttcctgatgatggaaccacggcgctttgatttctggataaataccgatatttttcccggtagagtgatttaacccctgaacaaattcaatctcttcttcaaaggtgtgcacccggaagtcggacttacccattgggaaacgccccggataagtctgcacttttttaccgttttcaatatcgaaaccttcggtaaatttcaacgacttaatttcatccagcgtgaaatctatcgcgtagtaacgaccgtctttgcgcgcccgatccgggaaacgatcggcaacatcagtaacacgatcgaggtaatggtcatgcagaacaaccagattgtcgtctttggtcatcaccaaatcctgttccagataatccgctccctgcgcatacgccatcgcttttgctggcagcgtatgctccggcaaatatccactggcaccgcgatgggcgatgactattttttcgttgctgtccgccgccattgcactgcttcccatgactatagtgctcatcatgatcgccatgctaaggtttttcagcgtcaatttcatgccattagcctccgttgcgttcttgcagtaattgttcatggcgacgtttttcgccaatcatcacaacaatcaacaagataaccgccagaatgctgccgccaatcattaccataaagccgccatcccagccgaagaagtccacggtgtagccaacaatcgcgctcgccgccaccgaaccgcccaggtaaccaaacagcccggtaaagcccgctgccgtacctgccgcttttttcggtgccagttccagcgcatgcagaccgatcagcatcacaggaccgtagatcaggaagccgataacaatcatacaaatcatatcgacggttgggttacctgccgggttcatccagtaaacgatagtcgcgatggtcaccagtgtcataaagaaaacgccggttgccccacggttgccacggaagactttatccgacatccagccgcacagcagagtgcccggaatacctgcatattcataaaggaagtaggcccaggaggatttatctagcgcgaaatgcttaacctctttcagataagtcggtgaccagtcgaggatgccgtaacgcagcagataaacgaacacgttggcgatggcgatataccacagcagtttgttcggcagtacgtactgcatgaagatttgcttcgccgtcagctcctgttccgctttttcgttatagtcgtccggataatcatttttgtactcttcgatcggcggcaagccacaggattgcggggtatcgcgcatcatcgcaaaggcgaataatgccaccagaatggcgcagaaagcaggcatatagagcgccgcatgccagtcattgaaccaggccatccccagcaggaacagcagcggcggaataccaccaccgacgttgtgcgcacagttccacactgacacaatgccgccacgttctttctgcgaccaccagtgcaccatagtacgaccacacggcggccaccccatcccctggaaccaaccgcagaggaacaacagtacaaacatcaccgcaatgctcgacgtcgcccatggcacaaagcccataaacaacatcactgccgccgccagaatcaaacctgcgggcaggaaaacgcgcggattcgagcgatccgataccgaacccatgatgaatttcgaaaatccataagcaatcgagatccccgaaagggcaaaacctaaatcaccgcgtgagaatccctgctcaaccagataaggcatagcaagcgcaaagttcttacgaaccaaatagtaagccgcatagccaaagaatatccccaggaaaatttgccagcgcaatcgacgataagtcggatcgatctccgcggcaggtaagcgcgctttgtgtggcgctggtttaaaaatactcaacattgatagcctccgtggcccgtggtcttatttatgattaacagcctgattcagtgagagaacctgccgtttcttgagttgccgcgatgttaagaaaacattcataaattaaatgtgaattgccgcacacattattaaataagatttacaaaatgttcaaaatgacgcatgaaatcacgtttcactttcgaattatgagcgaatatgcgcgaaatcaaacaattcatgtttttactatggctaaatggtaaaaaacgaacttcagagggataacaatgaaaactcgcgactcgcaatcaagtgacgtgattatcattggcggcggcgcaacgggagccgggattgcccgcgactgtgccctgcgcgggctgcgcgtgattttggttgagcgccacgacatcgcaaccggtgccaccgggcgtaaccacggcctgctgcacagcggtgcgcgctatgcggtaaccgatgcggaatcggcccgcgaatgcattagtgaaaaccagatcctgaaacgcattgcacgtcactgcgttgaaccaaccaacggcctgtttatcaccctgccggaagatgacctctccttccaggccacttttattcgcgcctgcgaagaagcagggatcagcgcagaagctatagacccgcagcaagcgcgcattatcgaacctgccgttaacccggcactgattggcgcggtgaaagttccggatggcaccgttgatccatttcgtctgaccgcagcaaacatgctggatgccaaagaacacggtgccgttatccttaccgctcatgaagtcacggggctgattcgtgaaggcgcgacggtgtgcggtgttcgtgtacgtaaccatctcaccggcgaaactcaggcccttcatgcacctgtcgtggttaatgccgctgggatctgggggcaacacattgccgaatatgccgatctgcgcattcgcatgttcccggcgaaaggatcgctgctgatcatggatcaccgcattaaccagcatgtgatcaaccgctgccgtaaaccttccgacgccgatattctggtgcctggcgataccatttcgctgattggtaccacctctttacgtattgattacaacgagattgacgataatcgagtgacggcagaagaggttgatattctgctgcgtgaaggggaaaaactggcccccgtgatggcgaaaacgcgcattttgcgggcctattctggcgtgcgcccgctggttgccagcgatgacgacccgagcggacgtaacgtcagccgtggcatcgtgctgctcgaccatgctgaacgcgatggtctggacggatttatcaccatcaccggtggcaaactgatgacctatcggctgatggctgaatgggctaccgacgcggtatgccgcaaactgggcaacacgcgcccctgtacgactgccgatctggcactgcctggttcacaagaacccgctgaagttaccttgcgtaaagtcatctccctgcctgccccgctgcgcggttctgcggtttatcgtcatggcgatcgcacgcctgcctggctgagcgaaggccgtctgcaccgtagcctggtatgtgagtgcgaagcggtaactgcgggtgaagtgcagtacgcggtagaaaatttaaacgttaatagcctgctggatttacgccgtcgtacccgtgtggggatgggcacctgccagggcgaactctgcgcctgccgcgctgccggactgctgcaacgttttaacgtcacgacgtccgcgcaatctatcgagcaactttccaccttccttaacgaacgctggaaaggcgtgcaacccatcgcctggggagatgcactgcgcgaaagcgaatttacccgctgggtttatcagggattgtgtggtctggagaaggagcagaaagatgcgctttgatactgtcattatgggcggcggcctcgccggattactctgtggcctgcaactgcaaaaacacggcctgcgctgtgccattgtcactcgtggtcaaagcgcactgcatttctcatccggatcgctggatttgctgagccatctgccagatggtcaaccggtgacagacattcacagtggactggaatctttgcgtcagcaggcaccagcccatccttactcccttctcgagccacaacgcgtgctcgatctcgcttgccaggcgcaggcattaatcgctgaaagcggtgcgcaattgcagggcagcgtagaacttgctcaccagcgggttacgccgctcggcactctgcgctctacctggctaagttcgccagaagtccccgtctggccgctgcccgcgaagaaaatatgtgtagtgggaattagcggcctgatggattttcaggcgcaccttgcggcagcttcgttgcgtgaactcggccttgccgttgaaaccgcagaaatagagctgccggaactggatgtgctgcgcaataacgccaccgaatttcgcgcggtgaatatcgcccgtttccttgataatgaagaaaactggccgctgttacttgatgcgcttattcctgtcgccaatacctgcgaaatgatcctgatgcccgcctgcttcggtctggccgatgacaaactgtggcgttggttgaatgaaaaactaccttgttcactgatgcttttgccaacgctgccgccttccgtgctgggcattcgtctgcaaaaccagttacagcgccagtttgtgcgccagggtggcgtgtggatgccgggcgatgaagtgaaaaaagtgacctgtaaaaatggcgtagtgaacgaaatctggacccgcaatcacgccgatattccgctacgtccacgtttcgcggttctcgccagcggcagtttctttagtggcggactggtagcggaacgtaacggcattcgagagccgattctcggccttgatgtgctacaaaccgccacgcggggtgaatggtataagggagatttttttgcgccgcaaccgtggcagcagttcggtgtaaccactgatgagacgctacgcccgtcacaggcagggcaaaccattgaaaacctgtttgccatcggttcggtgctgggcggatttgatcccatcgcccagggatgcggcggcggtgtttgtgccgtcagtgctttacatgccgctcaacagattgcccaacgcgcaggaggccaacaatgaatgacaccagcttcgaaaactgcattaagtgcaccgtctgcaccaccgcctgcccggtgagccgggtgaatcccggttatccagggccaaaacaagccgggccggatggcgagcgtctgcgtttgaaagatggcgcactgtatgacgaggcgctgaaatattgcatcaactgcaaacgttgtgaagtcgcctgcccgtccgatgtgaagattggcgatattatccagcgcgcgcgggcgaaatatgacaccacgcgcccgtcgctgcgtaattttgtgttgagtcataccgacctgatgggtagcgtttccacgccgttcgcaccaatcgtcaacaccgctacctcgctgaaaccggtgcggcagctgcttgatgcggcgttaaaaatcgatcatcgccgcacgctaccgaaatactccttcggcacgttccgtcgctggtatcgcagcgtggcggctcagcaagcacaatataaagaccaggtcgctttctttcacggctgcttcgttaactacaaccatccgcagttaggtaaagatttaattaaagtgctcaacgcaatgggtaccggtgtacaactgctcagcaaagaaaaatgctgcggcgtaccgctaatcgccaacggctttaccgataaagcacgcaaacaggcaattacgaatgtagagtcgatccgcgaagctgtgggagtaaaaggcattccggtgattgccacctcctcaacctgtacatttgccctgcgcgacgaatacccggaagtgctgaatgtcgacaacaaaggcttgcgcgatcatatcgaactggcaacccgctggctgtggcgcaagctggacgaaggcaaaacgttaccgctgaaaccgctgccgctgaaagtggtttatcacactccgtgccatatggaaaaaatgggctggacgctctacaccctggagctgttgcgtaacatcccggggcttgagttaacggtgctggattcccagtgctgcggtattgcgggtacttacggtttcaaaaaagagaactaccccacctcacaagccatcggcgcaccactgttccgccagatagaagaaagcggcgcagatctggtggtcaccgactgcgaaacctgtaaatggcagattgagatgtccacaagtcttcgctgcgaacatccgattacgctactggcccaggcgctggcttaaactcctttctgatgcccggtaagcatgtggttaccgggcatttttgcgtacacgattccgtgcccaatgtatgcgttgcaacgcagtgaaaattcctctgaaaacgtctcgcaaaggctgaaactggcagatgtcaaaggcctgggataaccgtaatgtcgcgtcatcataaatatcaggtgacggacaaccatgaccgaatcaacaacctcctccccgcatgatgcggtatttaaaacctttatgttcacacccgaaaccgcacgggattttctcgaaatacatttaccagaaccactgcgcaagctttgcaacctgcaaaccttacgcctggaacccactagttttattgaaaaaagtttacgcgcttactactcggatgttttgtggtccgtggaaaccagcgacggtgacggctatatctactgcgtgattgaacatcaaagctctgcagaaaagaatatggcttttcggctaatgcgctatgccactgccgccatgcagcgtcacctggacaaaggctatgacagagtcccgctggtggtgccgttgctgttttatcatggcgaaacctcgccttacccgtactcactcaactggctggatgagtttgacgatccgcaacttgcccggcagttgtacaccgaagcttttccgttggtggatatcaccatcgtacctgacgatgagatcatgcaacatcggcgtatagctctgctggaactgattcaaaagcatattcgcgaccgcgatttaatcggcatggtcgacaggatcaccacgcttttggttagaggcttcactaatgacagccagctacaaacactgtttaattatctgctgcaatgcggcgatacctcccgtttcacccgttttattgaggagattgccgaacgttcaccactacaaaaggagagattaatgactattgctgaacggctacggcaggaagggcatcaaattggctggcaggaaggtatgcatgaacaagccattaaaattgctttgcgcatgctggagcagggctttgaacgtgagattgtgctggcgacaacccaactcactgatgctgatattccgaactgtcattaaaaggagagattaatgactattgctgaacggctgcggcaggaaggacatcaaattggctggcaggaaggtaaattagaaggtttgcatgaacaagccattaaaattgctttgcgcatgctggaacagggctttgatcgtgaccaggtgctcgcggccacccagctaagcgaagccgatctggcagcgaataaccactaattaacacaggcccacagccgatccccatgggcctttgatatcaataactaccttttatgcgtggcccatttttgcctgatttaaacatcgccagtcgttgatccagggcatcgctgtagagcatcgtgtcaacgccaacagcgacaaagttcgctccccacgccaggcattgctgcgccatatcaggagccacagccagaaaaccagccgctttacccgcagcacggatccgccgaatactggtttcaataattcgctgcacttccgggtgcccggcgttatccgggtagcccaacgacgcagaaagatccgcaggtccaataaacacgccatcaatcccttcgacgtcgaggatttcgtccaggttatccagtgccgttttactttccacctgcaccaacagacaaagcgaatcgttaacttgcgccatgtaattctcaatgcgtccccagcgcgcagcccgtgccacactggccccgacaccacgctcaccgtagggaggatagcgcgtggcagacaccacctgacgtgcctgttcggcagtatcgaccatcgggatcagtagagtttgcgcgccaatatccaggacttgtttaatcagcggtttactgccttccaccggacggatcacgggttggctggcatagggcgctaccgcctgtagctgatgataaagatcctgaatggtgtttggcgcgtgctccccgtcaatcagcaaccagtcataaccagaagtggcggcaatttctgccatataggcagtcgttgagcttaaccacagaccaatttgcacttcgcccttgcgtaaacgttctttaaagggattgcttaataatgcgttcatcgtgttccttaacctatttaatgatgtgccacgtcggtctgcgcaacagtgcgatttacacgcagagtgaaaataatcagcgaaccgatgaccgccaccgctgccagcgtcagtaatcccgccgcatcgctggcaaataacgtttctgctttcacgcgcaggatcggggcaataaacccgcccactgcaccaaacaggtttacaaaaccaattcccgcagccagcgccgtaccggaaagcagttgtgtcggcatcgtccagaacactggctgcacggcaataaacccgatagctgcaacacacagcgctacgatcgccattactggagaaagcagcccggacagaccaataccaatgcccgccgccagtaatgtcagcgctgcgacattacgccgttcgccggttttatcggaatagcgcggaataagccaggtcccaaacaaggccgcaacccacggaatggcggtgaccaccgacgctgtaaagcccacttttgttcccagcaatgccgcaacctgggtcggcaggaagaaaattaatccgtaaaccgccacctgaatggtcaggtagataatcgctagttgccagactcggccattacgcagcgcatcgctcagccgagaagtcactttctgttgttcttcacttgccagttgattgataagcaacgttttttcttgtttactcagaaaacgtgcctgctccggtgtgtcatcaagccaaaagaatgtgaataccccagcaccgactgccaacaatccttcaatcacaaacatccagaaccagccgggatgccccataaatccatgcatctccaacagcgcgccggaaagcggtgatcccagtgttaacgccagcggtgcgcccatatagaacagccccataatgctggcgcgattacgctgcggaaaccattgcgaggtgagataaatcataccagggaaaaatccggcctccgcagcaccaagcagagtgcgaactatcagaaatttcgcttcagtatcggcccatgccatggctgccgaaagaaatccccacagcagtgttgtcgtaccaatccaggttctggcccccagtttgcgcatcaaaagattcgccggaacacccagaaacgcatataccacaaagaaaatgcctgctcccagcgcataagcttcattactcaacccggtatcaatctggtaggtctgtttggcaaaaccgatattcgaacggtcgagaaacgccagcacatacagcgccaacataaacggaattaaacgcacacggtttttcttcaccacggcgtcaagcaaagcggtgctcataaaaagctccttagaatatgtgggcgttaccgttgtcacagcaacgcccggagtgattagtggctgtaggggcgtttcaaattgcagtcacgattgagttcgacgccaaaaccgggtttatcaagcactgatttatgaatacgaccattcaccggaaccggctcattgagcagaatcgggtcaaactgcggacgcatcgttgaacaatccgggctggtcatcaggaattcgctgaatggcgtattggtgaaggtgatcaccgcatggtgagagtaaacagacgaaccgtgcggcaccaccagttgccccctggatttggcgattgcggcaatttccaccagcgtggttaaaccaccgcaccagccaacatccggctgcataatgtcgataccggtttctgaaagcgtacgaaaagattgcagtgtgccgtggtgctcaccgctggtgaccatcattccgactggcgcgttgcgtttcagttcgcgataactttcatactgctgtggcggcaggcactcttcgatccatttcaggttatagggcgcgcaagcgtgggccagtttggtcgcatagttcacgtcctgactcatccagcagtcgagcattaaccagaaatcctcaccgcatttttcacgcatatccgcgaccatagcggcatctttgcggatccccgcatcgccatcatgtggcccccagtgcgtcggcattttgccaccgataaagcccatctcttttgccagatccggacgcgcacctgtggcgtagaactgaatctcatcacgaacagcgccgcctaaaagtttataaaccggaagcccgaccactttgccgaacagatcccacagagccagatcgacacaagaaatcgtattcatcaccaggccaccagagccggagtaatacagggtggcactgagcatttgatcgtggatcagtttgatatcactgacacatttaccctcaatgaaacggttaagatgtttttcgacaataaaacagcccatttcaccggctgtcgaaacggcgaatccggtctggccgttttctgcttcgacttcaacaaccaacgtgccaagaacgttaatgccaaatgactggcgtgactgctcgtaatcgcggtatttactcatcggggtggcaatatgatcgtctatccagtgattcgccccctggtcgtgataatcaccgccgccagcgcctttttctgctgtcgcaccgccagtaaaccaggcgcgaacctgtttaatttttggtagggtcatgatgttctccattgttatgaggcttgtaagtcaaagggacttttccatcccaacagacgtgaaatatccctggcgcaggcaatggccttgcccgccagataatcacggtattcttcattgatttgtaagcgggtaccgaccaccgagatcgcagcggtaagctcgttattggcgttaaacaccggcgcagcgacacaacggacatcggcgtaatcttcgccgttgtcatagctccagccctgacggcgaatacgcgccagttcttcgtgaagttgctgtggatgagtaatcgttgtgggtgtcgcctgctcccagaccagcccttcgataatactttgctgtaccgctgcaggttgccaggcaagcaggcatttacctattccggagcgataaagcgaaaggctttttccttcatgggaacgcacgctgatagtggctgatgactccactttcaaaatgtaataagcgctgccgttatcaataatccccaggtgacataacagcccggtggtatccatcagttgcgtcaaacgcggtcgagccagttcccggagatccatcttgcttaacgcatgaccggaaagctccaccagcctggtccacaaacaaaaattttcctggtgatcaaggctaagaaaacgctgacgcctgagttcattaagcagcaaataggccgtgcttttagggattcccaatgtgtcaatgatcgtcgcagcactacaggggccaatgcgggcaatcaaattgagaatatcaatagcccgtgtcagggcgggaactttgcttgattccaacatactggactccagtcttagatactggaatcagtctcgttgctcagggggagtaaaattgtgaagcgcatcaaatcccgctcctcgtccagcagactggagaaattacgcacaaatttgtgaatcagcgcacggattttttcttattgagtacaacaggttggacaaattttgccggagggggaatgtgccggtgcagtaaaccggcacagagtggcggaatcagacagataaggtcatggactcaacaacctcaatccagccatgctcactggcgatatcctggccgtttaaccaacggcgcagcatattcagtgccatcattgcgcacacttcctgacggatagccaggctgtagcgcgtagtgctgaaacgcacacgcagagcgaaagtgccgtctggcgtggctagcgcaaagttgagatgctcgttctcgaaacccgaaacagccagtgccagcccggcaaaatggttggcccgccgttctgtaatccagtgcgcagtttgcgccagggtttcctcctgtgaaggaaccacttcacacgccagcaatggagcacctgcgcgagaaagttgcaaagccaataaaccaccggtgaattgctcgctcaacgtcaggctgaactggcggttttgcaattcgcgactgatctgcgcgggcagtccttcagtgccttcgaaaatcacgctctgtccggcaacacgtttaacatccagccacagtttttccatcgcctgttgctcgcttgccggtccggtgagtttcagttcgatgataggcattgaggagcgatagcccattgttacgcccggcggcagttgtagagtgtccaggctttgtgccagatcgctttccgaacgaccaaaagtagtcaaacgcagacaaaccggcggctgcggtaaagaaaaacgctcgcgcaggcgcggcaggatttcgtgctcgaccatcaccttaaattctgacggtacgccgggagtaaagaacatcaggcaacgattaagctgcacggcaaaaccacaggcggtgcctaccgggttattgataaattcagcactggcaggcagctccgcttgtttacggttgctcggtgccattactcgtccacgttcgtggaaatagcgttccatctctttgagccaggcttcatgcagcaccaggccttcaccttttgctgtcgcagcggcgagtgcgcttaaatcatcgctggtcggtcccagcccgccgttaacgatcagcacatcggcgtgctgactacgttcgcgaagaatggtgactaagtcatcaaggttatcccccaccgtattgcggcgagataatggcaacccctgatgaaagaaaaaatcggccagccaggcagcgttagtgtcaacgatttgcccgtgtaacacttcatccccggtggataacatttccacttttaacatggttatctcctgcttttgttatcgaatcactataacgcaaagggagataaggcgtagtaagaaactgaatggcgcgacagaatgccgcgccggaagggatcagaaactggcgttaaccccaacatacgggccgtcagccacggcgttgtcgcggttaccgtctttacccgacagattcaggtagcgataacccgcctcaatactgactggacgcataatggtgtaacgcgcgccagcattcgcttcttcataactttgaataccgctggagagcgaatccggagagtagtaatactcgccaaacaaacggaagctgttgccaattttccactgcaaaccacctcctaccgctgcggcataaccttcatcgccgtaattcgggttggtgtaaacgccttttccgccaacggtcgccattaacggcccgagaggcagattcaaccccagccccacgccagcgacatcaccgtcgtcgtcgttatgtgtccagttaccgcttaacgccaggcccgtcgtttcagtcccaaaaccgacaccaatattggtgtattctttacccgcctgaccgctgatgctcattgcattgaccgatgcagaaaccaacagcattccggccagacctgctagcgcaatttttttcattatcccctttcccacaagcaattaatcaaaattcccaaagctgcgggattgtactgcctggcacagaggattcaatgagcgaaaaaaaggatctagtcacttattgtaactaaatacttcttaaataattaaatgccgaaaaaataaacacactttatcgatacacacaaaaataataataagtacagttatcatcgcaaaagagattactgtcactttcacatatttgtgagttaccgtattctcatggtttctttttatttataaggaatatccctgtgcgacaacggactattgtatgccctttgattcaaaatgatggtgcttatttgctgtgtaaaatggccgacgatcgcggcgttttccccggtcaatgggcgatttcgggtggcggcgtggagcctggcgaacgaattgaagaggcactacgccgcgaaattcgcgaagaactgggagaacagctgcttttgacagaaatcacgccgtggaccttcagcgatgatattcgcaccaagacgtatgcagatggtcgcaaggaagagatttatatgatttacctgatttttgactgcgtttctgccaaccgagaagtgaaaataaacgaagagtttcaggactacgcgtgggtaaaacctgaagatctggtgcattatgatttgaatgtcgccacccgaaaaacgttacgtttgaaaggtcttctgtaacaatgatgacagccattactggctgtcagattgaaaatttagtggttaacgaattccccatccagataaactttgcctttttccacatgcatgactaaaccatccagataatcaggtttaaatgtcgcgtcacgcttatctttagcaatatatgtcaggcaatgattatgggtgaaaataacgatatttttatcaggcgctttgctttgtaagtccttaattgcactataaatctcattaccgcactgaagaagtcgtttatctaccgtcaattttttacccgctgaaaaccaggtagccgactgaatggtccggacggtattactggaataaagatcgaaatcagggatatcagcactaaaagcgttgcccagttcacgggcatcctgggtacctttaaccgtaatacctgttttatctgacaagcattgattggttgaacggtcgcaacgttcagcatgacgaaacaaaacgacaaccgggtgctgctgtgccagtctggccagtgttttattgtcgatacgtggcaaaccattgctactccaggcggcatgagtacccagtccggcaattgcagcgagcgccagtaaaatgatgatatatttttttgacttcaacgaagagcggcaaaaagctaacacgtaaactccacctatagacaagcgcaaccagacaattaccgtgaaattgagctacatttctggcgataattcgcagttggtgtaatattaaaaatcctacgatgtcggcaaaatgcctcaaaattttgccaaatgcaaagcctaaataagaaaaaatataaaaatttcaatatttacgtctaatattagtttcttaaggttaagttaatattctatccttaaaatttcgctccaaatggcaaaatatacacaacactctttatagcaaatataagtggacaggtattcaatggcggaaggaaaagcaatgtcagaatttttgcctttttcgcgaccagcaatgggcgtggaggaactcgctgcagttaaagaggttctcgaatccggttggatcacaaccggtccgaagaatcaggcgcttgagcaagctttttgccagttgacgggaaatcagcatgccatcgcggtcagttcagccaccgccggaatgcatatcacgctaatggcgttgaaaattggcaagggcgatgaagtgattacgccttccctgacctgggtttcaaccctcaatatgatttccttgttgggtgcaacgccggtaatggtggatgtcgaccgcgatacgctgatggtcactcctgaagctatcgagtcagccattacgccacgcactaaagccatcattccggtgcattatgccggtgcgccagcagatattgacgccattcgcgccattggcgaacgttacggcatcgcagttatcgaagatgctgcccatgccgtcggtacgtattacaaagggcgacatattggcgcaaaaggtaccgctattttttcatttcatgccattaaaaatattacctgtgctgaaggtggcctgattgtaactgataatgaaaaccttgcccgccagctacggatgctgaaatttcacggtctgggtgtcgatgcctatgacagacaaacctggggccgtgcaccgcaggctgaagtcttaacaccgggctataagtacaatctgaccgatattaacgccgcgattgccctgacacagttagtcaaattagagcacctcaacacccgtcggcgcgaaattgcccagcaatatcagcaagcactggcagctctcccctttcagccattaagccttcccgcctggccgcacgttcacgcctggcatctgtttattattcgtgtcgatgaacaacgttgtggtatcagtcgcgatgcgttgatggaagcgttaaaagaaagaggcattggtaccgggttacatttccgcgccgctcacacacaaaaatattatcgcgagcgttttcccacgctgtcgttaccgaataccgaatggaatagcgaacgcatctgttctttgccgctgttcccggatatgactaccgccgatgccgaccatgtcatcacagcccttcagcaactcgcaggacaataagccatgtttgaaatccaccctgttaagaaagtctcggtgattattcccgtttataacgagcaggaaagcttaccggaattaatcaggcgcaccaccacagcctgtgaatcgttggggaaagagtatgagatcctgctgattgatgacggcagtagcgataattccgcgcatatgctggtcgaagcctcacaagcggagaacagccatattgtgtctattttgcttaaccgcaattacgggcaacattcagcgattatggcgggattcagtcacgttactggcgacttaattattacccttgatgccgatctccagaatccgccagaagaaatcccccgcctggtggcaaaagccgatgaaggttacgacgtggtagggactgtacgccagaaccgccaggacagctggtttcgtaaaaccgcttcgaagatgattaaccggcttattcagcgcaccactggcaaagcgatgggtgattacggttgtatgctgcgcgcctatcgccgtcatattgtcgatgcgatgttgcactgccatgaacgcagcacctttatcccgattctggcgaatatcttcgcccgccgtgccattgaaattccagtacatcatgccgagcgtgagtttggtgaatccaaatacagttttatgcgcctgattaatttgatgtacgacctggtgacctgccttaccacaacgccgctacgtatgctgagtctgctcggcagcattattgcgattggaggttttagcattgcggtgctgctggtgattttacgcctgaccttcggaccacaatgggcggcagaaggcgtctttatgctatttgccgtgctgtttacttttattggcgctcagtttatcggcatgggattactcggtgaatatatcggcaggatctacaccgatgtccgcgcccgcccccgctattttgttcagcaagttatccgtccatccagcaaggaaaatgaataatgaaaaccgtcgtttttgcctaccacgatatgggatgcctcggtattgaagccctgctggctgccggttacgaaattagcgccatttttacccatactgataatcccggtgaaaaagccttttatggttcggtggctcgtctggcggcggaaagaggcattccggtttatgcgccggataacgttaatcatccgctgtgggtggaacgcattgcccaactgtcgccagatgtgattttctctttttattatcgccatcttatttacgacgaaattttgcagctcgctcccgcaggtgcatttaatctgcatggttcgctgttaccaaaatatcgtggtcgcgcgccgctgaactgggtgctggtcaacggtgaaacggaaactggcgttacattgcaccgaatggtgaaacgtgccgatgccggggccattgtggcgcaactgcgcattgccattgcgccagacgatatcgctattacgctgcatcataaattgtgccatgccgcgcgccagctactggaacagacattacccgccattaaacacggtaatattctggaaatcgcccagcgcgaaaacgaagccacctgttttggtcgcagaacgccggatgacagtttccttgaatggcataaaccggcatccgtactgcacaacatggtacgtgccgttgccgatccgtggccgggtgccttcagctatgttggcaatcagaaattcaccgtctggtcgtcgcgtgttcatcctcatgccagcaaagcacagccggggagcgtgatttctgttgcgccactgctgattgcctgtggcgatggcgcgctggaaatcgtcaccggacaggcgggcgacggcattactatgcagggctcgcaattagcgcagacgctgggcctggtgcaaggttcacgcttgaatagccagcctgcctgcaccgcccgacgccgtacccgggtactcatcctcggggtgaatggctttattggcaaccatctgacagaacgcctgctgcgcgaagatcattatgaagtttacggtctggatattggcagcgatgcgataagccgttttctgaatcatccgcattttcactttgttgaaggcgatatcagtattcattccgaatggattgagtatcatgtcaaaaaatgtgatgtcgtcttgccgctggtggcgatagccacgccgattgaatatacccgcaacccgctgcgcgtatttgaactcgattttgaagagaatctgcgcattatccgctactgcgtgaagtaccgtaagcgaatcatcttcccgtcaacttcagaagtttatgggatgtgtagcgataaatacttcgatgaggaccattctaatttaatcgtcggcccggtgaataaaccacgctggatttattcggtatcaaaacaattacttgatcgggtgatctgggcctatggcgaaaaagagggtttacagttcaccctcttccgcccgtttaactggatgggaccacgactggataaccttaatgcagcgcgaattggcagctcccgcgctattacgcaactcattctcaatctggtagaaggttcaccgattaagctgattgatggcggaaaacaaaaacgctgctttactgatattcgcgatggtatcgaggcgttataccgcattatcgaaaatgcgggaaatcgctgcgacggtgaaattatcaacattggcaatcctgagaacgaagcgagcattgaggaactgggcgagatgctgctggcgagcttcgaaaaacatccgctgcgccatcatttcccaccgtttgcgggctttcgcgttgtcgaaagtagcagctactacggcaaaggatatcaggacgtagagcatcgtaaaccgagcatccgcaatgcccaccgctgcctggactgggagccgaaaattgatatgcaggaaaccatcgacgaaacgctggatttcttcctgcgcaccgttgatcttacggataaaccatcatgaccaaagtaggcttacgcattgatgtcgatacctttcgtggcacccgtgaaggcgtgccgcgtctgctggaaatcttgagtaagcataatattcaggccagcatttttttcagcgtcggcccggacaatatgggccgccatctctggcgactggtgaagccacagtttttgtggaagatgctgcgctcaaacgcggcatcgctttatggctgggatattttactggcaggtacggcctggccaggtaaagagattggtcatgccaatgccgatatcattcgtgaagcggctaaacatcacgaagtcggcctgcacgcctgggatcaccatgcatggcaagcccgtagcggtaactgggatcggcaaacaatgatcgacgatattgcacgcggtcttcgcactctggaagagattatcggtcaaccggtaacctgttctgccgctgcgggctggcgtgccgaccagaaggtgatcgaagcaaaagaagcgttccatttgcgctacaacagcgattgtcgtggggccatgccgttccgtccattgctcgaatcaggaaaccctggcactgcgcaaattccggtgaccttacccacctgggatgaagtgattggtcgggatgtgaaagcagaagattttaacggttggttactcaaccgcatcctgcgagataaaggcacgccggtttataccattcatgcagaagttgaaggctgcgcttatcagcataattttgtggatctcctcaaacgcgcagctcaggaaggcgtgacattttgccctttaagcgaactgttatcagagacgttgccgctcggacaagttgttcgcggaaatattgccggacgtgaaggctggctgggttgccaacaaattgcgggtagtcgctgatgaaatcggtacgttaccttatcggcctcttcgcgtttattgcctgctattacctgttaccgatcagcacgcgtctgctctggcaacccgatgaaacgcgttatgcggaaatcagtcgagaaatgctggcatccggcgactggattgtgccccatctgttagggctacgttatttcgaaaaacccattgccggatactggattaacagcattgggcaatggctatttggcgcgaataactttggtgtgcgggcaggcgttatctttgcgaccctgttaactgccgcgctggtgacctggtttactctgcgcttatggcgcgataaacgtctggctctactcgccacagtaatttatctctcattgtttattgtctatgccatcggcacttatgccgtgctcgatccgtttattgcattctggctggtggcgggaatgtgcagcttctggctggcaatgcaggcacagacgtggaaaggcaaaagcgcaggatttttactgctgggaatcacctgcggcatgggggtgatgaccaaaggttttctcgcccttgccgtgccggtattaagcgtgctgccatgggtagcgacgcaaaaacgctggaaagatctctttatttacggctggctggcggttatcagttgcgtactgacggttctcccttggggactggcgatagcgcagcgggagcctaacttctggcactattttttctgggttgagcatattcaacgctttgcactggatgatgcccaacatagagctccgttctggtactacgtgccggtcatcattgccggtagcctgccgtggctgggattactccccggtgcactgtacacaggctggaaaaaccgcaagcattccgcaaccgtctatttgttgagctggacgataatgccgctgctgtttttctccgtcgctaaaggtaaattgcccacctatattctttcctgctttgcatctctggcaatgctgatggcgcattacgctttgctggcagcaaaaaataatcctctggcgctgcggattaatggctggattaacatcgcttttggcgtcactggcattattgccacatttgtggtctccccgtggggaccaatgaacacgccggtgtggcaaaccttcgagagctataaagtcttttgtgcctggtcgattttttcgctatgggcatttttcggctggtacaccttaacaaacgtcgaaaagacctggccttttgccgcgctttgcccgctggggctggcgttgctggtaggattttcaattcctgacagagttatggaaggaaaacatccgcaattttttgtcgagatgacacaagaatcacttcagccaagccgctatattcttactgatagcgtcggtgttgccgcaggtctggcatggagcctgcaacgcgatgacatcatcatgtatcgccagacaggtgagttgaaatacggccttaattatccggatgcgaaagggagatttgtcagcggtgatgagttcgcaaactggcttaatcaacatcgtcaggaggggattattactctcgtgctttcggttgaccgcgatgaagatatcaacagtctcgccattccgcccgcagatgccatcgatcgtcaggagcgtctggtgctgattcagtatcgtcccaaatgatctggctaacattagtctttgccagcttgcttagcgttgccgggcagttgtgtcagaaacaggcaacctgctttgtggcgataaacaaacggcgcaaacatatcgtgctgtggctgggactggcgctggcttgtcttggtcttgccatggtgctctggctgctggtcttgcagaacgtaccggtaggcattgcttacccgatgttaagtctgaattttgtctgggtgacgctggctgcagtaaaactgtggcacgaaccggtatcgccgcgtcactggtgtggggtggcgttcattattggcggcattgtgatcctcgggagtacggtgtaatgggcctgatgtggggattattcagcgtcattattgcctcagttgcgcaattaagcctgggttttgcggcgagtcatctgccgccgatgacgcacttatgggattttatcgcggctctgttagcttttggcctggatgcccggatactgttactcgggctgctgggttatctgctttccgttttttgttggtataaaacgcttcataaacttgcgctaagcaaagcctatgccttgctcagtatgagttatgtgctggtatggattgcttcaatggtacttcccggctgggaagggactttttcgctgaaagcactactgggagtagcctgtattatgagcgggttgatgctgattttcctgcccacgacaaaacaacgttactgagttttccctgccactttacactgccgttcccactcatcggggctataactgcttgccgagaggactttcaccgtatgcagcttttcacgattaatacaataaagcgcattctgcaaaggcgagagtaaatcccccactttcacggcgaagtcactcttcacttcggcgatcatttttatcgcgccgccagcatcgcagagcataagtacatgtctgttatcttgtttattgcagcacgattttttgaccagccattccattgcattatcctgtttgctaagagttttcacatcaatttacagattaacagataaactctttatcaacggcaatggaatggcagaaatgagaagtgaaacggagggttaattattgctgacgttgcacccactcttttagcgcctgacgtgaaattttaataccgccgtttttcagctccggcggcagagttagccagcgcaccggttgttgaaaacgggccagcttatctttcacccattcactaagatcaacgctctcgtggtcatactccatcaccgccaccggtcgatgaccaaactccttgtcggcaacggggacgataaacacctgcaaaaccgcaggatgtgcagcaattacgcgctcgacttcttccggctgaataccctctccgccactgaagaatagattgtctaaacgtccgacaatggtcagcttgccattatgcatctcaccgcgatcgcgcgtagcgtaccagccttcgtcattaaccagtgaaaccagttgcccgttacgccagtaaccttctgccatactggcagcccgcagccacacttcattattaacgattttcacttcccgacccggcagcggcgaaccaacgtctgccaggccgtcggcttctttcgcacacaccgtggaggcaaactcggtcagaccatagccgcaaaagcaacgaatcccctgctcgcgcgcctgttccgtcaactcgaccgggatagccgcgccgccaagtaacaccgctttcagggaaacggaactacggttaaccagcaaacgccagagttgtgttggcaccagtgaagcgtgagtacagcctgccagcatttgctccaatggctgtttatcacgtaccgtcatccgcgcaccagcgtataaccagcgccacataattccctgaccggagacgtgaaacagcggtaaagagagcaaccaatcatcgtgatcgccaaacggaatcagcgataacacaccttgcgcactggcaagatgggcctgataagtatggacagcggctttcggcaaaccggtagaacccgaggtcaacgtcattgagcacagacgcgtcggctgccacgtagcggcatgtgcgccttcaaccagctgaatgtgcagcgacgttaatgccggaaacgtgttttccccatccggcaccagagcaaattgcagcgtcagattgggcagcaattcttcaagcaacggttgcggcagctgagggttcacgggcaacacccgcgccccgcattgcagtaacgccagccaggcgagcagcgtttgcggcgtattccacgcccgcaacatcacgccgctgccctcaaccaccccctgcaccgcaaatccggaggctaattcatcgacgcgagcacaaagctcgcgccagttgagttgctcgtcattaagacgtaaggcgatggtttctccccgcacttgccgccagtgacgccacggccagtcagagaagatcataacaaccgctccagtgcatcaacttccacgacaggcagcgtgctacccggccagcgacgtacctgctgcgcctgcatcagatccagcgtgtccagccctggaatggtgtccggcgttaaccaggcggcaatccgcgccagttgcgttaagcctaagctcgattcaatggaagaactgatcaccgccgtcagccccagcgcgtgcgccgcctgtacctgctcgcgtactttttccagactgcccgtgagcgtgggtttgataactaccgcgcgcacgccctcttcagccacaaaggcaaaatccggctcgcgcaggctttcatcccaggcaatggcaatgccggtttcacgggcaaacgctcgcgaatcatcgcgggttttgcacggctcttcgagaaacgcgatgcggtcgcgataatccgggttaacgtatttggcaaactgctgacctttcagcggtgtccaggcgcgatttgcgtcaagacgcaaatgcagatccggaattgcctccagcaacagattcaccaccatgccgtcgcgcaccgcttcgtacaatcccactttgaccttcgccactttctcgcctggcatatctgcaagtttgaggatcagatcgtccggatcgccattacacagcggtgccgcacggtagttggctgcttgcggcaacgtatctgtcagttctgccaatgcacagcttacgccaaaggccacggaaggcatctgcggtagctcgcaatcgcctgccagccagttatttacccaggcaagcagcacactttgcgcctcttcccaggtttcctgactgaagcccggcagtggggagatctccccccacccttcgcgctcgccttcacgcaggcaaacatacagcccgtcgcgggtttttaaccgcctgtcgcgcagaaccacccccgcgtccatggggatctgccagcggtatacctgcgcgctacgcattacggattccgtttgaatttgctgaagtcaggctgacgtttctggttgaaggcgttgcgaccttcctgaccttcttccgtcatgtagaacagcatggtggcgttgcccgccagctcctgcagccccgcctgcccgtcacagtcggcgttcagtgcagctttcaggcagcgcagcgccatcgggctgttttgcagcatttcgcggcaccaacggacggtttctttttccagatccgccagcggtaccacggtgttcacaaggcccatatccagcgcctgttttgcgtcgtactgacggcacaggaaccagatttcacgcgcttttttctgcccgacgatgcgagccatgtaggaagcgccccagccgccgtcgaaggaaccgactttcgggccagtctgaccgaagatggcattatctgccgcgatagtcaggtcgcacatcatgtgcagaacgtgaccgccgccgatggagtagccagccaccatcgcgacaaccggtttcggacaggtacggatctgacgctggaagtccagcacattcaggtgatgtacgccggaatcatctttatagccgccgtaatcaccacgcactttctggtcaccaccggagcagaacgctttatcgcctgcaccagtcagaatgatcacgccgatgttgtcgtcataacgcgcatctgccagcgcctggatcatctcttttaccgtcagaggacggaaggcattgcgcacctgcggacgattaatggtgatttttgcgataccgtcggtggatttttcataacgaatgtcctcgaaaccttcggagcagtcgtgccattcaaccggtgcgtaaagcattgcttcatcaggataaatcatattgtgtcctttagtcagaaacgcaagatctgcgccagacttgcgattacgccagcgggattttcccgatgcgcgttatgtccggcgcgaggaatgacatggcagtcggcagccagttccgccgccagggcgcggaatttgctgtcacgttcaccacataaataataaaacgcaaatgtgcgggcgctaaggttagcacgtaaatcaggctggacggcgagagaagtcgcctccagcatggcggcaagcgttgcgccattattgttgctgcgcagcgccaccagctcccggcgttgatcgtcattgagtgaggcaaaaacaggctgttgataccagtcggcaaataccgccgttaacggttctgtgagaaaacgctgcacccattggcgatcggaacgctgacgttccgcacgttgttcagcattttgcagccccggatgcccgccttcgacaataaccccacaaagccccgccagcccctggcaagccgccatcatcgccccccgtccaccaagcgagtaccccaccagccagaagtcaaggatgttgtaactaaccaaggttttacgcagtaagtcggtgacatcatcaaatccatcgacgctaatcgccgccgaaccaccgtgacctgggagatcaacatacaaccgtgagtagtcggcaaacgcctcgcccacttcttgccattcgtggcaatcgccggaaaaaccgtgcaaaaacaccagccagggtaaacctggttttccgtgttttgcctgcgcgtgcaggatcataaatggcttacctgcgccagaagttgctggagcgtttgcgcaccatcggtgtcgttaaccaccatttcaatcaccgtggtggttggcgtgcgccaggcgtcggcaaatgccgtttcaagttcctgccagttttgcggacgatgatatttcagctcgaacatcgcggcggcgtgctcaaaatggacgttttgcggcatcagatagaaacgctcacgctcgctttgcggcgttggcaacagcgagaaaatttgcccgccgttgttgttcaccacaattaataccagcggcgcagaaacctgacgcaataacgccagcgcgttgagatcgtaaagtgcggagagatcgcccacaatcgccagcgtcggtttgccgcttgcccgctgaacgccggcggcggtcgaaagcagcccgtcgataccgctggccccacggttgctgtacaccgggtaacctgccggaagttgcgaaagcgcatcaatcagacgtaccaccaggctgttaccaacaaacaattgcccctgttcaggcagatagtcgcagatgcgatgcgccagttgcgcttcgccaaacgcatcacggcgggcaataaccgcctgcattgcctgttccgccaggcgcgggatttcaacgcaccagggctggcgtttttctgccggatgcagctccagccagtcggcaatattggcaattaagcgacgtccgcgatggtgtgccggatcaagtcgcccttcaatgtcatcaacaatccagtactcttctggttcacagcttgcctgccattgcaggagccgtttccccgtcaggctgcttcccagttgcaccacaatttgcgcctgctgcagctcgctggtcgctttggcattgcctaaccaaagatcggcacacggcagcggctgcccggtttgtgacagcacatcgccaatcagcggccagccaagagtttgcgcccacagggcaacttttttgccctcttccgcactcatgcgcccggcaaccaccacgccgcgcttttgtcgccagaagaaccagtcgcgctgtttttcactttccagacgaggcgcttcacgcagccacggtttgtcgtcctgccaccagtcacccagacgctgttgccagctaagcccggtatcgtccatttcgccatacagcggttcagcaaacgggcagttgatatggactccccccgcatgaagcgtaccgagagcgtggtcgatggtagaaaccagccaacgtgcggggatatcctgggtcgggcgcggcaatgaaatactgtgcgtggggtgagaggcgaacattcccggctggcgaattgcctgattcgcgccgcagtcaattagctccggcgggcgatcggcggttaagagaatcagtttttctccggttaacccggcttcaatcagtgccggatagagatttgccaccgccgtgccggaggtcacaatcaccgccaccggctgcttgctgactttcgccagccccagcgccagatgccccaacccacgctcatcgaaatgggtgtggtgaatgaatgcggaattctccgccgccgctaacgttaacggtgtagaacgcgagcctggggcgatacagatgtgtctgacgccgtgacgcgttaatgcttccagaatgaccgccgcccagcgtcggttaaatgcgcttactgacatgagtttgtccggtatcaatattgcggctaagtataaggagctacaaaaatagattattgatatgaatcggtaatgatgcgactcattactattccatttgtaataaagtacgcagccctgccgctttgttgtcgatttcctgccactcttgctcggggtcggaaccacggacaatgcccgcgccagcatataatcgcacgacattgccgctaatttttgctgagcgcagggaaacgcagaattcgctttgttgtaatgagagatagcccgcagaaccggcgtaccattctcgggtgaacggttcgtgacgggcgataaactgtcgcgccagatcgcgcggtaagccagcaactgctgccgttggctgcaactgatgtaaacagatcacatcatccgctttgttgagtgaagtccagatacagcggcgaagatgctgcactttacgcagacgcagtacctgcggcggtaaaacatccagcgtctgggtatcggcctgtaatcgttgacagatatcttccaccaccagcatgttctcgcgctggtttttatcatccgccatcagccactctcctaactgctgcgcctgcttatcatcaggattatttgctactgttcccgccagcgcttcagtacgcagcgctttgtcacgccgccgccataaccgttccggtgaagagccaagaaaagcattttcgccatcaaaggccatgtaaaaatggtagcaattcagattcagtcgacgactggcagccatcatcgccgccgcgttgaccggacttgcgaaatgcaggtcagttgcccgagcgagcaccactttgtcgagctcaccttcggcgatggttttcgttgccagttcgattaattgcgtccagcccgttttgtccggccagtgttgttctcgcgtggtggttaaatgtaacccaggcaagggcttgatactcaccagtgtggcgataaattcttttgcctgaatcgcatcgtgctgaagggagctttcgctgaatagcgtcagccgcagcgtggctttaccgccacagcgtcgccattccaggcggggtaaaagtaaattgccctgcgacgggtcaaaagcattcagcccccaaatgcgtaagtcggcgtgttccgggtgctggcgaagaaaacgttgtgcctggtccaacgacgtaaaacgggtaatcgcgcccaggacgacagcttcttcatcaccattacgttgttgccagtagaattgcgggtatgtttgctgactggccagccagctcaaggcatcaaaagcgtctttgagagggaaaggaatatcgataacccgaatgccgggtgtcgccggaatctcttgcgacaaatggcgcagtagattttccagcgccgtagtaagtgattgcacgcggacctctccctgttaaaagcctcacattatacggggtactacaaaaaaaatgcagtaccccggtgtagggaggttttaacggcgtgccagcaacagtcctagtaccagcccaacggccgcgcccacaccaattccttgccagggtttttcgtggacgtagtcatcagcacgataaactgcctgcttcgcccgatagtaataactgtctgaagcctggctaacccgttttttcacatcatccagcgctttttctgcacgcgctttcagctcaacatatttctgatcggcgggatcgccagaggagcggagcacctcttccagtgtttcactaagcagcgtcaggtcgtcatcgatacgtgtatcaccaaactgattagacattctcgttctccatttgcgtaaaacctgtcactaactatagacaagggttgttgattacgcctgaattacctcgcgtgccatcccaatgtgtgggataccatcttcttcatagacctccgtcacagggataaaaccgaaactctggtagaagttttgcagatgcgcctgcgccccgaggtaaacaggcttatcaggccagtgatgcgtacatgtttcgagtgttttactcatcagctgctgccccactttttcgccacgcaacgcttcactgacaatcacccgacctataacgaccggctcaagatcatcatcacttttcagaatcctcgcatacgccaccagttcatcatttttccaaccgagaatatggcgattatcccccgtcaaatcatcaccatcgatatcctgataagggcaattctgctcgacaacaaacaccgcgcaacgcagttgtaataaggcataaagctgggaaaccgataattcagagtgatgcagatcttgccattcaatcataatgctctccttttagatgtatgccttatactagccggaatattttttgaaacgtgatgaactcatggaattaatttttttaggtacttcagccggtgtgccaacccgcacgcgcaatgtcacggcaatattgcttaacctgcaacatccgacccagagcggactttggttgtttgactgcggtgaaggcacccagcatcagctactgcataccgcctttaaccctggaaaactggacaagatttttatcagtcaccttcatggcgatcatctttttggtttacccggcttgctgtgcagtcgttctatgtcaggcattatccaacccttaacgatttatggtccgcaaggtatccgtgaatttgtggaaaccgcgctgcggattagcggctcatggaccgattatccgctggaaattgtcgaaattggcgctggcgaaattctcgatgatggcctgcgcaaagtaaccgcttatccgctggaacacccactggaatgttatggctatcgtattgaagaacatgataaaccgggtgcattaaatgcccaggcattaaaagctgctggcgtgccgcctggcccactgtttcaggaattaaaagcgggcaaaacaatcacgctggaagatggaaggcagattaacggcgcagattacttagctgctccagtgccaggtaaagcgctcgctattttcggcgataccggcccctgcgatgccgcacttgacctggctaaaggtgtcgatgtcatggtgcacgaagcgacgctggatataaccatggaagccaaagccaatagtcgcggccatagctctacacgccaggctgcgacactagcccgtgaggctggagtcggcaagctaatcattacccacgtcagctcgcgctatgatgacaaaggttgtcagcacctgttacgtgaatgcaggtcaattttcccggcgactgaactggcgaatgatttcaccgtgtttaacgtttaactctgcttattattaaaaacagggcgaaacttgccctgttatcgcaacccgcgctacatatatccacccacacaggcatattgagcgatttttgatatttattcatctccttacgcactatattcagagcaataagttgcctcttttcatcttgattcagcacaacctttgcaactaaaaggagcccatgatggttacagttgtcagcaattattgtcaattatctcaaacgcaactcagtcagacatttgcagaaaaatttactgtgaccgaggaattactgcagtctttaaaaaaaacagcgttatccggagatgaagaaagcattgagttactgcataatattgcgttaggttatgataaatttgggaaagaagctgaagatattctttaccatattgttagaaccccaacaaatgagaccctatcgattatccgacttatcaaaaatgcttgtttaaaattatataatctggcacatatcgcaaccaactcccccctcaaatcacatgattcagatgatctcctgttcaaaaaactattctccccttcgaaattaatgacaattatcggtgatgaaattcctcttatatctgaaaaacagtcgctttcaaaggtgcttttaaatgatgagaataatgaactgagtgatggtacaaacttctgggataaaaatcgtcaattaaccacagatgaaatagcttgctatcttcagaagatcgccgctaatgcaaaaaatgctcaagtcaattatcctactgttctctacgtcccctactccaccagaactcacctggaagacgctctcaatgaaaatattaagagcgatccatcatggccgaatgaagtccagttattccccataaatactggcggacactggatattagtttcgctacagaaaatagtaaataaaaaaaataataaactacaaataaaatgcgtcatattcaactcattgcgtgcactaggctatgataaagaaaattcacttaagcgtgtcattaatagttttaattctgaactcatgggagaaatgtcgaataataatataaaagttcatttaaatgaaccagagataatatttttacatgccgatcttcagcaatacttaagccaaagttgcggtgcatttgtgtgcatggcagcccaggaagtgattgaacaaagggaaagcaattctgacagcgccccctatacgttattaaaaaactatgctgacagatttaaaaaatattcagcagaagagcagtacgaaattgattttcaacatcgactggcaaacagaaattgttatttagataaatatggcgatgcaaatatcaatcattattatagaaacttagaaataaaacactcacaacccaaaaatagagcatccggcaaaagagtgagttaacatcattgttaattaattcgaccagtcagcaaatatgctgactggtcgaacatagtttgctaaacagtcatcactgactgatgtcagtcacaccatccgccagttcaatcaggcgaataaattccgccctgtaaccctgtggatcttccccttttgcctgctgagcccactgtttgatctgctgccaggaggtattgttcaggtattcagaaccgcgtaacttttgcccatatgcagctactgctgcgcgaaaacgcatatcttcagagggcgcgtttattgttggccccagcgggaattcaactaactgactttcttttccctgcgggtatttccagcgaatttttaaccaggccagttctttcgttttgtccgatttcgctaatttgttatccggggcatagcgtaacttatcaattgatgctttttgcccgttcagcgttaattcgaataacaacgttatatgtttgcctgcgcctatatcccctgcatcaacgttgtcgttattaaaatgttccacccgaagttggcgcttttcataaccaatctgacggtattccgttacccacgcggggttaaactcaatttgcgctttgacatcttttgctacggtaatcaacatctgccgcatttcactattcaatactttctgcgcttcagagagggtatcaatgtagctgtagttgccgttaccaacatcggcaattcgcaccatcattgcctcgttgtaattgctattccccacgccaaacgtcgacagagtaacaccagactcccgctgttttttgaccattgattcaatcgattttggatcgtcaatgccaacgttaaagtcaccgtcagtggctaataaaatgcgattgatgccgcccttaataaaccccttcgtcgcctgctgataagccagttccagcccggcaccgccattggtactgccttcggcatccagcgaatcaattgcggcattaatttccgccttatgactcccggagatagaaggcaatgcaatacgggagtcgccagcgtaggtcacgatggcaatgttatcctgctcacgaagttctttgaccaataatttcaacgaagactggataagtggcaaacgttcatcagaaatcattgaaccagaagtgtcgataagaaagaccagattagaagctggtaactcttcacttttgcgatctttcgccaggatatcaactttcagcaatgttcgctgttcattccatggtgcaggtgccaattcgtagcgcatagcgaaaggtattggcttagaggccggaatagattgtttgtctttgatatcccaatcagacgggaaataattgactatctcctccacccgcacagcgtctggcggaggtaacagcccttgattgaggaaacgccttacattcgcataactgccagtgtcaacgtcaagactaaacgtcgccaacggattttgcgctacctgcttaaccggattatcatcgaactgctggtagcgagcggttcctggatttgcgatatgtgtagcttttgctttagccgctcttgcaaatgttggcgcttcctgcaatcgcccctgtaaagcctgtttgtctgaatattgttgcacttcttgctgggccaaggctttcgcggcggcggcgctttgctcagcctcttttattgcagcttgctgcgcggcaagcacttgctgctctgtgggagtactgggttgttgttgctgactttccttattctcaggttgcggcccacatcctgacaaaatcaaactactcataagcaacatgattatatttttatttcgcatataaaatccttttaaataaactcaggcaccagacataaaatatactctttgtataatcctgctaatcttaataaaatacaatatcgaaacccatagcaaataatgattcaacaacgcaacccattaataatttgcatatgaaaaaaataatctttgcttttattatattatttgtgtttttactccctatgattattttttaccaaccctgggtcaatgcattaccgtcaacgccccgacacgcaagtcctgagcaattagaaaaaacagttcgttatcttacacaaactgtgcatccacgtagtgccgacaatattgataatctgaataggtccgcagaatatataaaagaggtctttgtcagtagcggtgccagagttacctcgcaggacgtccccattacgggtggcccctacaaaaacattgttgctgattatggtcctgccgatggaccgctgattattattggtgcgcattatgactctgccagcagttatgaaaacgatcaattgacctatacgccgggcgcggatgataacgccagcggtgtggcaggattactcgaactggcacgtttgttacatcagcaagtaccgaaaacaggcgtgcagctggtcgcctatgcgtcggaagaaccgcccttctttcgtagcgatgaaatggggagcgcggtgcatgcagcttcgcttgagcgtccagtgaaattaatgatagcactggagatgattggctattacgactctgcgcctggaagccagaattacccttacccggcaatgtcctggctttatcccgatcggggagactttattgccgtggtcggcagaatacaggatatcaacgccgttcgtcaggtaaaagcggcattgttgtcatctcaggatttatctgtttattctatgaataccccagggtttattcccggtattgatttctctgaccacctgaattattggcaacacgatattcccgccataatgattactgacaccgctttttatcgtaataaacaataccacttgcccggtgataccgcagacagattgaattatcagaaaatggctcaggtagtggatggtgttataactttgttatacaacagtaaataataaaaatttctcgaggcgggtccagaaaaagcgacatgcacattttattttccctcatctgttttaagatgcgaaacatgaaattcaacggaggaaaaataaatgggaatgattggctattttgcagaaattgactcagaaaagattaaccaactgcttgagtctactgaaaaacctttgatggataatatacatgacacgctttcaggattacgccgactggatattgataaacgctgggattttttacactttgggctgacaggcacctctgcttttgatcccgcgaagaatgatccgctgagtcgtgccgtgcttggtgaacacagcctcgaagatggcatagatggcttccttggattgacctggaatcaggagttagccgcgacaatcgaccgactggaatcactggatcgaaatgaactgcgtaaacagttttccattaagcgactcaatgaaatggagatttatccgggagtgaccttttcagaagagttagaggggcaactctttgcctcgatcatgcttgatatggaaaagctgattagcgcgtatcgacgtatgctgcgacaagggaatcatgcgctgacggttattgttgggtgatatagcttgatgcctgggggagaaagacccattagttaagatttacgccaggatcatcttgaaaaaatctttaaccatggtccggtttttatccccttgtataaatattactaaatgcttgcttagtcgcattgttaaatgcaataccgtatattcggtatgtaacagcgatatcctctgtgctggcaacgatctgtcatgcttgatgaaaacggaattgaacctgtcattaccaggtagataaaaagcctgttcaattttgggattattttttataactcgtgtctgttatggcgacacgggaaaacatcaatattgtccttcacaaattgcagtaatatagaatcaacctctcttgcaagttggtcacaatgtattataagcattttgaatatgtcatcctctgtaatctcgtgaaaattttcggccttgtcttttagctcatcatatcggattcttgcagtaaccattttttgggcgagttctaataaccccaaagcttgcaattgctggtgagtatgatcactttcaaaaaatatcccacactccattccttcccaaccaacatattcatgccattcataaaccagcataaatgtttgtaaaactggcggtaataattggatatctgcaaaaccaaaccaaaacttacgcttgagatcccactcatattcaatcgccaatgctatattgtttaaggcatctccggcatccttatttttacgcaaaatcaattccgtcagtgtatagcgttgttcatcaatacgccgaagagcttctgcaatatcatagtttgtagccaacaaaacattctctgcttcctgatgagtgacgtctgcttttgccgtcaatatattgatttggtcaatatgaaacaacttgatggcttcatcaacatcaccgccagtcctctctaacaaacgtctggcaacctggataccgacaggtacgttcttccgaagtttacgaatttcacttaaccattccatgtcaaacccctttaaatatttatgatattaaatataacaacgtctggataacgacccggcctgactgaatatctcacgttttcctgcttaacattcatgttatgatgctcttgaaactaataatacgtatggaattgtcactatttatctgctaatgaattcaaacaatgtcattcgtttgatgaatatattatttcagggaataattatgacacctttagaacgcattacccaacttgttaatatcaatggtgatgttaataatcctgatactcctcgtccattgttatctcttgaggatttttttattgacaataatatccatggttcaatatgttgcaatgtgattccagaacaatctccgcaagctatctatcaccattttctgaaaatacgtgagcgtaacaatgttagtgatgttttggtagaaattacgatgttcgatgacccagactggccctttagtgaaagtattttagttatcaccactgcttcaccagaagaagttcagagctggtttgtagaagaaattgcccctgatgagtgctgggaaggatggtcagaagatacggagcatggatgggttgaagtccctgtgggtatgcatccggttacttgttggtgggattaaaacatttatataaacagataagcggatgtttacataaatttttatgtgaaggaacatgatgaaacttattcctcgcagtagtgatatttcacctggcattgatggaatttgcccggggtcttttcctccgaacggatttaccgtacttacagatgcagcatatggtaacggagactgtttcggtttgtactggcctattggtcaggagcataaactacctatagtgtgcgaaacgtaccatgacgaatggcgaatcgtacctgccttttccagcattaagaagttcgaagaatggctggaagtgaatgatgatgatccccatgaaaatggcatcagcatcgaagatcaagactttgcagcaaatctcttccgtgttgctcggaaatgtctttcaacgggaaggcttgatgacgcactgccactgttacagcgagcaacagaacaattgcctgaagtcagcgaatattggttagcactggcaatccagtatcgccgatgtaaaaaaacagaagctgcagcacaggctgcgcttaatgcttatcttggcaattgggcatttggtgttcctgacaataaagtcattcatttgctgtcacaggccgcagatgtcccgaatttccaggatgatcctgtgattcagtgcattaaagaacaaggattagatcttagctttggaggaacaaaggaaaataataattaccccttgatgcagatgtgtgttgatacttattttgcgcagagaaaaccgcttcaggcattaaccctgttacataattatgcctggataatgtccagtgaaacgactgcatttcaggaacgctatgattttaatatcgatgaatggcgggcaaaattcaggcagttatgtttagagtattttggcgatagtcgtacacagttcacttaacgctctgcgtctatctactatcccttctttttcagaaaaaccgccgagcatgtcggcggctttctgacttacaaagtaacagattacatcagcggcattgccaaacgcacaatgctaatcagcggttgtggccatacacccagcaccagtaccaacagtgcagagatcagcacaacgataccgcccgcgctgtactgccagtttgatggtgcatcgcgacccggttgttccggggcgtgaagatacaggctcaccgccacgcgcaggtagtagtagaggccgattgccgaaccgacaaccacggcacccaccagccaccacaagtgtgcctggacaccgaccgccagcacgtagaacttaccgataaagcccagcgtcatcgggataccggccagagacagcatcatcaccgtcatcactgccgcgaggatcggacgatgccagaacagaccgcggtaagagaacagggaatcagcatccgggccacgatacgggctggacatcaggctgaccacgccgaacgcgccgaggctgctgaacagataaccggccaggtaaacccctaccgcttccatcgacatctcgccggtttgcagcgcaatcagcgctaccagcagatagccgaggtgagagatagatgagtaaccgagcagacgtttgatattggtctggctcagcgccatcaggttaccgaagatgatggaggcaaaggcgataatcgccagcaccacgcgaatcgcttcgctgtcacccaccggtgcgtagaggaacagacgcatcaccacaccgaagatagcgattttgctcgccgtcgccaggaaagtggaaaccggcgcaggcgcgccctggtatacgtctggcgtccacaggtggaacggcaccagagagagtttgaagccgaggccaacaatcatcaggccgaaacctgccagcaacagcggctcgttgagcataccgtcgccaaggtttttacccaacgcgacaaacgacaggtcgccagactgcgcatacaccagcgccataccaaacagcaggaaagaagacgctgcggcagaaaggatggtgtatttgatactggcttccagtgaacgtttctggcggaaagcgtaaccgaccaggccaaacagcggcaaagagatcagttcgataccgaggaacagagacgccagatggttggcattcgccagcaggatcccgcccagcgcggcaattaacaccaacaggtagaactcatccttgttgtcgttatagccttcaagccacgggtaggcgaaagtacaggtggcgaggctcgccaacaataccagcccggtgtaaagcatggcgaaaccatcaacgcgcatcagcggcgtaacgtccatagcgcccgcctggccaacaaaccagagcgaaaccagcgccgcgttaagcccaataaccgagagcgtagcgttgaggaaatgattgcgtcgccacgcaatggagagcatcacaaccaccaccgtcaagccgacgatcagcaacggtagcagtgcgatcaggttttgtggagttattgtcatggcgatttacggccttgtagtagtaacggaattaacaaaccactgctggatattgccaatcgcggagtgcgaggtatccagaatcggctgcggatagaagcccagcagtaccagcagcaccaccagcaacaggatcataaacagctcacgcagcgacatccctggcagttcctggctggcaatctggcttttcgctttaccgaagtaagcgcgatgtaacatcgccagcgaataaacagatgcaaagaccagcccaaaggtagagataacggtaatcaccggtacaacctggaagctgccgaacagaatcataaattcgccgacgaagttaccggtgccaggcatcccaagcgttgccaccgcaaagaacagcgacagtgctggcagccatttcatcttgctccacagaccgcccatcatgcgcatgtcgcgggtatggatacgttcataaagctgaccacaaagaataaacagacccgccgccgacaaaccgtgcgcaatcatctggattaccgcgccctggtaggccaactggctgccggtgtagatagcaatcagcacgaagcccatgtgggaaaccgaggtgtaggcgatcagacgtttgatatcggtctgggcgaaggccatccacgcaccgtagaagatgccgataacacccagccacatagcaattggcgcgaactctgccgacgcgttcgggaacagcggcagggagaaacgcagcaaaccgtaagcggcagttttcagcaagatccccgcgaggtcaacggaaccggcggtcggagcctgggagtgcgcatccggcagccagccatgcagcggaaccaccggcattttgactgcgaaggcgatgaagaagcccagcattaacaggtattccacaccactggacattggcgtattcagcagctcttcatagttgaaggtccagacgccggtcgcattgtagtgaacaaaaaccagcgccaggatggcaatcaacatcaccaggccactcgcctgggtgtaaatgaagaacttggttgccgccgtgatacgcgttttaccgtcagaggctttatgcccccacagtgcgatcaggaagtacatcggcaccagcatcatttcccagaagaagaagaacaggaacatgtcgatggcaaggaacacgccgataacgccgcccaggatccacatcaggttgaggtggaagaagccctgatatttttcgatctctttccacgaacatagtaccgccagcacaccgagcagaccggtcagcacgaccatcagcagcgacagcccgtcaatggcgagatgaatagagataccaaaacgcgggatccacggcatgtcgaattcagactgccactgcggaattccggcggattgcgtcagtgaataaccgccctgcaaccacagttgcagcgacagcgccagcgtcaatcccatggtgatcagcgcgatccagcgtggcaccttgacgccaaagcgttcggtctgccagcacaggaagccgccaataaagggaattaatattagccagggtagtaacatggcgatctttattccttgtaaaagtcccgtcaggaccggattttcaacgaattctcacgacagaaaattctcttcggactgggggtagtgtcggatgcaccgcgaaggcggcttatccgacctacgttcttatatgcccaggggcaatcccacaatccttaactcaacgcagtaccatcaacagtgccagcaccacgaccgcaccgatgctcatggatgccacataccagcgcagatagccgttctcacttaacagcagacctttacctgcaaagcgggaaaggacagccgggatgttcatcattgagttcagcggatcgcgtttcagcaaccaggcaatacccaggaacggcttgacgaacactttgtcatacagccagtcaaatccccaggcgttgtaccaccaggtgcccagcagacggcccggcgcactgttggcgatggaggtcaccagagtacgtttacccagccacagccaggctgccagcagaatgccgaccaccgcgaccacgccagaggtaatttccagggtcaacatgctgccgtgcgccagttccgtcgtttgcggaagcacgccctgcagcggcggtacaatcagtgcgccaacgaaggtggaaaggatcagcagcacaatcagcggcaggctgtgagttacccctttcacggcgtgagcgtgaatttgttcttttccgtggaagacgatgaaaatcatacggaaggtgtagagcgaggtcataaacgcaccgaccagacctgccaccatcagattgatatgaccattcgccatcgcacccgcgaggatctcatccttactgaagaagcccgcagtgaccagcggtagtgccgacagtgctgcgccgcccaccaggaagcagagataaaccagcggaatagatttacgcagaccgcccatcttgaagatgttctgttcgtgatggcaggccagaatgacggaaccggatgccaggaacagcagcgctttaaagaacgcgtgggtcatcaagtggaaaatcgccgcatcccatgcctgcacgccaagcgcgaggaacatgtagccaatctggctcatggtagagtaagcgagaacacgtttgatgtcggtctgtaccagcgcggcaaaaccggccagcagcagcgtaaccgccccgacaatacccaccagatgcagaacttccggcgtcatcaggaacaggccgtgggtacgggcgatcaggtagacacccgcggttaccatggttgcggcgtggatcagcgcggagacaggcgtcgggcccgccatcgcgtcggcaagccatgtctgcaacggcaactgcgcagatttaccgaccgcaccgcccagcagcatcagcgtcgcccacatcagcatgttattgccgtcagcaaagtgcgctggtgccagttccaccatttcgcggaagttcagggtgcccagttcgttgtaaagaatgaacagtgcgaaagcgaggaacacgtcacccacacgggtcacgacgaacgctttcattgccgctgcgccattcttcggatcggtgtaatagaacccgatcagcagataggagcacaggcccacgccttcccagccgaggtacatcagcagcaggttgtcggcaagcaccagaaccaccatgctggcgatgaacaggttggtgtaagcgaagaagcgagagtagccctcttcaccgcgcatataccaggaggcgtacatgtgaataaggaaacccacaccagtgaccaccgagagcatggtcagcgacaggccgtccagcaccaggttaaaaccgatgttaaagtcgcctaccgacatccacgtccacagcggctggctgtatgtctgctcaccgttagcgaagaaatcaacgccgataaaggcggttaccagcgccgccaggcccacagagcctacgccgacgatcgccgagacgttttcagaccagcgcccacgggagaatgccagcaggacgaagccaatcaatggcaaaataatggttaaggcaagcatgttcatccgcgcatctcacttactgaatcgatgttcaggttctggcgacgacggtgaagttgcagcagcagcgcaaggccgatactcgcttctgccgccgcgaggctgatggcgagaatgtacatcacctgaccgtcggtctggccccagtagcttccggcgaccacgaaggccagcgcggaggcgttaatcatgatttccagaccaatcaacataaacagcagattgcgacggataaccagaccggttaagccaagaacgaataagattgccgcgaggatcagtccatgttgtaaggggatcatgcgtgctcctccgtttttcttttcgcgctgtcgtctttacgattgctcagcacttcacccgcacgctcttcacgaccgacgtggaaggccacaaccagacctgcgagcagcagcatagaagccagttccaccgccagtacgtaaggcccgaacagcgtaatacccactgctttagcactgattggcgtaccgtcgataccctgatcgttaacaccgaggatggcgtaaacaatcaccaccagcatgatggccgacaaaattgccggaccaatccacacctgcggtttcagccactggcgttcctgttcgatttctgaaccgcccaggttgagcatcatcaccacgaacacgaacagcaccataatggcacccgcgtagacgataatttccagcgcaccggcgaagtaagcgcccagtgagaagaacaccccggaaatcgccagcagcgaaataatcaggtacagcagtgcgtgtaccggattggtatgggtgatcactcgcaaggtcgcaagtatggctatcaggccacagatataaaaagcgaactccattgcccctctccttacggtaacaggctcttgacgtcgataggcttggcttcgttctctgcttcgcccttatctttgccgtcgattgccatacctgccatccggtagaagttatattccgggtatttgcccggaccggagatcagcagatcctctttctcgtaaaccagatcctggcgcttgtattcccccatttcgaaatccggggttaactgaatcgccgtggtcggacaggcttcttcgcacagaccacagaaaatgcagcgtgagaagttgatgcggaaaaattccgggtaccagcgaccgtctttggtttctgctttttgcagcgagatacagccgaccgggcaggctaccgcgcagaggttacaggctacgcaacgctcttcgccgtccgggtcgcgggtcagaacgatacgaccacgataacggggcggcagatagaccggctcttccgggtacattcgcgtttcgcgtttggcgaacgcgtgcaggccgatcatccagatactacgaacctgggtgccgaaacctactaacaattcttttaaggtcatggtcttattgccccttattgcgcctgccagagaatgacagccgccgttaccagcaagttgatcagcgtcagcggcaggcagattttccagccgaaggacattacctggtcataacgcggacgcggtaacgacgcacgaatcaaaatgaacatcatcataaagaacgcggttttcagcgcgaaccagatgaatggcggtaacaacgggccttgccagccaccgaagaacagcgtcaccatcaatgcagagatggtcacaatcccgatgtactcacccacgaagaacagaccgaacttcataccggaatattcaatgtggtaaccatccgccagttcctgctcggcttccggctggtcaaacgggtgacggtgacataccgccacgcccgcgatggcaaaggtaataaaaccaaagaattgcgggataacgttccacacatgcgcctggctgttgacgatgtcggtcatgttgaatgaaccggcctgcgccaccacgcccatcaaggaaagcccgaggaacacttcgtagctcagggtctgcgcagaagcacgcatcgcacccagcaacgagtatttgttgttacttgaccagcccgcaaacagcaccgcgtaaaccgccagacctgccatcatcaggaagaacaaaatcccgatgttcaggtcggcaaccacccaacccggactgactggcacaatcgcaaaggccagcagcagcgaggtaaaggcaatcatcggtgccagggtaaagatgacgcgatccgagaatttcgggatccagtcttctttaaagaacattttgatcatgtccgcaaccagctggagcgaaccgccccagccaacacggttaggtccgtaacggttctggaacagacccagcaggcgacgttcgccaaagctcatgaatgccccgcaggtgacaaccaccagcaggatcaccaccgctttgaggatggtcagcaggatctcaatcagttccggtgatatccaactcattgttgtgcctccttgagatcctcaagatgcgcgccagccagcaccggagcaatgccggacatacccatcggcaagcccacctgccctgccgtcagtccttcggcgatttcaaccggcagcgtgaccgtgttgccatcgtaactaaaggagacgcgtgtacctgcgttcacacccaacttcgcggcatccgctgggttgagtttgatgtacggctgcggcatacggctctggaagaccggagcacgctgtgacaattcatcgctgccaaacaggtggtaatacggcgcgatacgccatttcccgtcctgcggctggaagcgtgccggtacgctggtgaagtaatccagaccattttcgctggtttcaaacagacgcacgcccggatcgccaaagcgcagtttgccgcccacttcgtcctggaatttgttccacgcctgcggggagttccagcccggcgcccaggcaaacggcacttgcgaacggtgcgcagtcggctggttgttaccttccatcgagaaggtgaacatggtgtcaatatcctgcggctgacgcggctcatgaacgctgatattggcgcgcatggcggtacgaccgctgtaacggtgcggttcacgggccagtttctgcccacgaatacggaatgtcgcatccggcgcagcatctttgatacctgccagttccgggattttcgccacaacagcgtcaatcacatggtcgagctgcgtccagtccacttcacggctcagcagggtgctgtgcagcgagtgtaaccagcgccagctttccagcatgacagttttgctgtcgtaataagcaggatcgtaaacctggaagaaacgttgggcgcggccttcgttgttgatcaccgtaccgtcgctttcagcaaagctggcagcagaaagtaccagatgggcgttttccataatcgctgtgcgttgatgatcaaccaccatcaccagcggtgctttagccagcgcagcattcacgcggatagcagaagcgtgacgatgcagatcgttttccaacaccaccaccgcgtcggcgcgtccggtttccagttcggttaacgcttcttcaagcgaaccgccacccataatgcccagccccatgctgttgacggaacgggcaatcatggtgataccgacgtcagcgccgcgacctttcagggctttcgcgacgttagccgccgcctgaatcacctctaagctaccggcgttcgtcccggagataatcaacggtttcttcgcacctgccagtgcctgcacgatgacgtcgattttgctttgcagctcaggttcgataccgtcaaccgctggtgcagagttatccagcgcatgggcgatggcaaaacctaaacgcgcctgatcttcaaccggtgcgcggtaagtccacgccgcgatatcatccagacgggtgtcatcaacgttggtaacaaacagcggatgcttcgcacgttgaccgatgttgaggattgccgcaatctgccagtcagccactttctgtgctgccgccatttcgcgcgctttacctttcacagcctgacgcactgccagcgcgacgcgcgcgccggtctgggtaacgtcttcgcccagcaccagtaccgcatcgtaagattcgatttcgcgcagagccggagtataaatgccgccttcacgcagcactttcagcgccagttgcagacgttcctgctcaccgtgagcgataccggtgtagaagttttcttcgcccaccagttcacgcagcgcaaagttgctttccacgctggcacgcggagaaccaataccgatcactttcttcgactgacgcagaatatctgccgcgccctgcattgcctgttcggcgttgagggtaatgaaatcatcgccacgacgctgtactggctgacgcggacgatccttcaggttgacgtaaccgtaaccgaaacgaccacggtcgcagaggaagtagtggtttaccgtaccgttgtaacggttttcgatacgacgcagttcgccgtaacgttcaccggggctgatgttacagccgatggaacattgctggcagatgctcggcgcaaactgcatatcccatttacggttgtaacgctcggagtgcgttttgtcggtaaatacgccggtcgggcaaatttcgaccaggttaccggaaaattcgctttccagcgtgccgtcttccgggcgaccgaagtagacgttgtcgtgcgcaccgtaaacgcccagatctgtaccgtcagcgtaatctttgtagtaacgcacacagcggtagcaggcgatgcagcggttcatttcgtgagagatgaatggccccaaatcctgattacggtgggtacgtttggtgaaacggtagcgacggaagctgtgtccggtcatcacagtcatatcctgaagatggcagttaccgccctcttcacataccggacagtcgtgcgggtggttggtcatcaaccactcgaccacgctttcacggaactgtttcgcttcttcgtcgtcaatggaaataaaggtgccatcggaagccggtgtcatacaggacatcaccaggcgaccacgcgtgtcttccgcgttttggtattgcttcaccgcacactggcggcaagcaccgacacttcccagcgccggatgccagcaaaagtaaggaatatcaaggcccagagacagacaagcttccagcaggttgtccgctccgttgacctcgtattctttgccgtctacatgaattgtagccattagcatgcttccagttttctcagtcagagactgagcgttaatcgaaattcggttaccagcgctctttcagcaggttcggctgaatcccattaatcaaatgggtattgctgaacggctgtttgattcccgcctcaaattcttcgcggaaatatttgatggcgctctgtaacggctccactgcaccaggtgcgtgggcacagaaagttttacccgggcctaagaatcgacacagttgctcaagtgtttcgatatcgcccggctgaccttcaccacgctccagcgcacgcagaattttcacgctccacggcagaccgtcgcggcacggcgtacaccagccgcaggactcacgggcgaaaaactcttccaggttacgcaccagcgacaccatgttgatctcatggtcaaccgccatcgccagcgccgtacccagacggctgcccgctttaccgatactttcgaattccatcggcagatcaaggtgcgcttcggtcaggaagtcagtccccgcgccgcctggctgccaggctttaaatttcagaccatcacgcataccaccggcgtaatcttcgaggatctcgcgtgcggtggtgccgaacggcagttcccacagtcccggatttttcacccgaccggagaagcccatcagcttggtgccagcatctttacttttcgagatgttctgataccactccacgccgttagcgaggatcgccggaacgttacacagggtttcgacgttgttgacacaggtcggtttaccccatgcgccggaggttgccgggaagggtggcttcgagcgtgggttagcacgacgtccttccagggagttgattaacgctgtttcttccccgcagatgtagcgccctgccccggtatggacgaacagttcgaaatcgaaacctgttcccataatgtttttgccaagcagacccgcttcggtggcttcggcaatggcacggcgcagattaactgccgcttcgatatattcgccacgcaggaagatgtagccacggtaagctttcagcgcaaacgcggagatgagcataccttccaccagcaggtgcggcagttgctccatcaacaggcggtctttataggtgcccggctccatttcatcggcattacacagcaggtaacggatgttcatggattcgtctttcggcatcaggctccatttcaggccagtcgagaagcccgcgccgccgcgccctttcagaccagcgtcttttacctgattaacgatttcgtccggagacagcccggtcagcgccttacgcgcgccttcgtaaccgtttttgctgcggtattcgtccagccacactggctgtttgtcatcgcgcagacgccaggtcagcggatgcgtttcgggagtacggataatgtttttcatttataccgctccagcagttcagggatcgcttccggggtcagatgcgcgtgagtgtcctcatcgatcatcatgtttggccctttatcacagttccccaggcagcaagttggcagcagcgtaaagcggccatcaaatgtcgtttgccctggtttgatgttcagctttttctcgagcgccgcctgaataccctgataaccgttgatatgacagaccacgctgtcacaataacggatcacatggcgaccaaccggctggcggaagatctgactgtagaacgttgccacaccttcgacgtcgcttgccggaatacccagcacatcggcgatcgcgtggatcgcaccatccggcacccagccacgctgcttctgaacgattttcagcgcttcaatggacgccgcacgcgggtcttcgtagtggtgcatctcgtgctcgatcgcttcacgctctgccgcactcagctcaaaagcctcggtttgtggttgttgattctcgtgcataattagcggtccacatctgacataacaaaatcgatactgcccagataaacaatcaggtcagacaccaggctgccgcggatcgccgccggaatttgctgcaaatgcgcaaagctcggggtacgaacacgggtgcggtaactcatggtgctgccgtcgctggtcaggtagtaactgttgatccctttggtcgcctcaatcatctggaaagattcattggcaggcatcaccggaccccacgacacttgcaggaagtgggtgatcagggtttcgatatgttgcagcgtgcgctctttcggcggcggcgtggtcagcgggtgatccgctttgaacgggccttccggcatgttgttgaggcactgctcaagaatgcgcagactctggcgcagctcttccactttaagcattacgcgggtgtagcagtcagaaacgccaccacccaccgggatttcaaagtcgaagttttcatagccagaataaggacgcgccttacgcacgtcgaagtcgatcccggtagcacgcaggcccgcgccagtggtgccccactccagcgcctctttcgcgccataggcggcaacgccctgggaacgacctttcagaatggtgttttgcagcgccgctttctcgtaagacgccagacgtttcggcatccagtcgaggaactcacgcagcaggcgatcccagccgcgcggcaggtcgtgcgctacgccgccaatacggaaccacgccgggtgcatacggaaaccagtgattgcttccaccagatcgtaaattttctgacgatcggtaaaggcgaagaacactggcgtcattgcgccgacgtcctgaataaaggtcgagatatacagcaggtgactgttgatgcggaacagttcggagagcataacgcgaatgacgttaacgcgatccggcacggtgatcccggccagtttctctaccgccagcacgtaaggcatttcgttaacgcagccgccgaggtattcgatacggtcagtatacggaatgtagctgtgccaggactggcgttcgcccattttctccgcaccacggtggtggtaaccgatgtctggtacgcagtcgacaatctcttcgccatcgagttgcaaaacgatacggaaagccccgtgcgccgacgggtggttcggaccgaggttgaggaacatgaagtcctcgttttcggtgccgcgcttcatcccccactcttccggtttgaaggtcagggcttccatctccagatcctgtttggctttggtcagctcaaacggcgagaattcggtagcgcgcgccggataatctttacgcagcgggtgacctttccaggtttgcggcatcatgatgcgtcgcaggttcgggtgaccgtcgaaagtaatgccaaacagatcccaggtttcacgctcataccagttagcgttcgggaacagtttggtgaaggtcggtacgtgcaggtcgttttctgccagcgccaccttcagcatgatgtcgcggttacgatcgatagaaatcagatggtagaaaacggaaaaatccgcggcaggtaacccttcgcggtgtgtgcgcagacgttcgtccatgccgtgtaagtcaaacagcatgacgtaaggtttcggcagtttctttaagaaatcgccaacttccagtaattgttcacgcttgatccacacaacgggaaccccggtgcgagtcgcctgaacagtaaaggcatccggcccaaaacggttgcgcagttcgccaatcaccggatcatcaagatgatcgcgggtctgccaggcgggttcttgcgcggttaagtcggtcatattgttcaccattgcaaatggtccgtggtgactgtcggcgcagtaagcttcgcgaaatagatttaggaataagcgaagaaaaatccctttgccgacaggcgcaaattaaatctcgtcaggtgtacgcaggttagttacggcaatgcgttcaccgcgcttgcgttcgcgctctgattgcatattggcgcgataaacgccctgatcgccaaccacccaggagagcggacgacgttctttgccgatagattcctgcaacagcatcagtgcctgcatgtacgcttcaggacgcggcgggcagcccgggatatacacatcaaccgggatgaatttatcgacgccctgcacaacggaataaatatcgtacataccaccagagttggcacaggcacccattgagataacccattttggttccagcatctggtcatacagacgctgaataaccggtgccattttggtaaagcaggttcctgcaaccaccatcaggtcagcctgacgcggcgaagcacgcaatacttctgcgccaaaacgcgccacgtcatgcaccgcggtaaacgaagtcaccatctcaacgtaacagcaggaaagaccgaagttatacggccaaattgagtttttacgaccccagttaaccatgtcattgagcttgcccataaacacgtttttgttaacttcttgctccagagggtcggttacgatctcctgcttttgcagggggtaacggtcgttctcaccgttgggatctatgcgggtgagcgtataatccatcttaatgcctcgcggttagcgttgacgattagcgatactgttcgtttccgggttcatacgctcgcggcgtgaacgcgcgggcgtccagtccagcgcgccaatacgcaccagataaaccagacctgccagtaacacaaaaataaaaattgcagcttccacaaagcctacccagccgctttcgcggatagaggttgaccatgcgaacagatacagcgcttcaacgtcgaagataacgaagaacatggccaccagataaaacttggcggacaggcgtaagcgggcggagccgaccgagtcgataccggattcaaacggcacgtttttcgacctcgcgcgtgcgcgaccgcctaaaaaccaaccgcctaccagcatcaggcaacacaggccaatggcaacgataagaaagatagcgaatgcccagtgatgagcgatgacttcagtggatgttgacatactcattgcttactcatcaaaagtagcgccagattcactgctcttcacggcagatggacgccacatcgattcatggggaggaataaaaaaaaccttacaatcactgtagaaattcttttatacagctaattgatgtggtcttttactcctttctataaccttttgtcaactttaacaaaagtttcttcacattagtttacataatatcaacaccattagcatttaatgccctttcaccccagatccttgacgactccaggataattagatgttgttgaatcgtgtccgttgtgaagcaatggaaaaaatacgggtctattttgacaggaatttgtgtcgattcctccccccaaaagagagtattttcttgatctgtgacacgcttttgtcattccataacaaaaacgcagcaacaaatttacgtattttttaacatcattgtagcaggtgatttttttcaggcgattatttgtgcgttcgggacgtgaatctctggtgattgaaaaatgaacagttttgtgcgttctgcactatgcgaggaaggatttttactaaaaaaaagccgctggggtttaaaacacccccagcggctcgttttttacactattgtctcaggaattatctatcgtccgtcgattactcgatatccctttcaatcaacaatgaatcatccccttccggagcagacattgggctgtattgccacggattatggtagctctccatcgcctgatagatcacctgggccagctcattattactggacgggtcatagcacagcaaatattcggtatcaggtagcggcggtaagccatctactccactcagcacacgcaggtccgggctcatcatttcaaccggccttgccgtcacgccaagaccggctttcactgccgcacgaacggccggaagcgtcgaggcgacataagccagtcgccatggaatatctgctttattaagcgtcgccagcaccatatcgcgaaacggacttggatcatccagcaatacaagagggatcggctcacctttttgcaatacgtattccgctgcgcagtaccagtgtgttggcgaggtacgcaggttcaatgccttaaaggtagaaggacgatgggtggttaccatcaaatccacttcctgggattccagcatttctgccatataggcattacgtttaacgcggacatccagcgctaatttcggataaaccgaactcacgcgatttaacaggaaaggtaagatcgtatcggcagattcatctgaagcaccgatagttaacacgccctgaagattactgaacattaatgatgagcaggcctcatcattaaaacgcaggattttcctggcgtaaccaagaagttgaatgccatgttcagttaacagtttgttgcgaccgtgacgagcgaacagttctttcccaacgagttgttccagacgctgcatttgctgacttacggcggactgagtacgacacacagcggcagctgcggcagcaaaagtgttcagatcggcaacagcaacaaatgttctcagcagatcgaggtcgaggttaattatcggacgatttgcacttatcatatattatcacttactggcggctcatactgagctggttaatgctgtgcacacacaaacaagcaattccatttgtaatgtgcctccctggcagtttcatccggaacccggacgaaagtaaaaatgcatatgagttgcactaaaaaagcgactcacattgttccgttataatgcctgaagtagatcacagaatatatcttcagggatcgcatatctattaagttactcactcttttctatttatgacatgcgcgtgtttgtataaatgtaaatgtgagtccttgttccactctcgtgcagcatcgctggtcatacgcgaacacgtacaaacagcaatggtgaggcggcatcaagagcagggatccgtcatttatgcgagcattttaccccaaaaaccttttatttataagggtcattgcgaattatctgatgcaaagttatgttatgttaggcaaagtaatcttctattattaataagcacatcaaaacctttttgaatattaaataataattaattagcatcatcctcattcattaattccgcttaacaatagtttcacaccttgcccccattacgacacctcggaaatcatcacgctgttaaactctccgtaatgcggaaatatcatcatcgcgtttcattagtgaattcttaaatgaggcattttcacacaattatcttacagataaaaaaaccagacttacaattaagaatcagaacaattcactatataacattgcatgtaaagcatatacacctcattattttgtcattattaagttattaacagcacaatcgagccttcccctctggcaaaatcttattctgcagaccttcaaaacaccgtcctgggggagtacattgttctaagctgacttccacggcagggagtggcgataacagcaaaaaaggtcaagattcatgtcccccattgaaaaatccagcaaattagagaatgtctgttatgacatccgtggtccggtgctgaaagaagcaaaacgcctggaagaagaaggtaacaaggtactgaaactgaacatcggcaacccagccccgttcggttttgacgcgccagatgaaatcctcgttgacgtgatacgcaacctgcctaccgctcaagggtattgcgattccaaaggtctttactccgcgcgtaaagccatcatgcagcactaccaggctcgtggcatgcgtgatgttaccgtggaagatatttacatcggcaatggtgtatcggagcttatcgttcaggcaatgcaggcattgctgaacagcggggacgaaatgttggttcctgcaccagattacccactatggaccgcggcggtttcgctttccagcggtaaagcggtgcattatctttgcgatgaatcctctgactggttcccggacctcgatgatattcgcgctaaaattacgcctcgtacgcgtgggatcgttattatcaacccaaataacccaaccggcgcggtatattccaaagagcttttaatggagattgtggagattgcacgtcagcataatctcattatcttcgccgatgaaatttatgacaaaattctctacgaccacgctgagcatcactcaattgcaccgctggcacctgacctgctgaccattacctttaacggactgtcgaaaacgtaccgcgttgcaggcttccgtcaggggtggatggtgttgaacgggccgaaaaaacacgccaaaggctacatcgaaggtctggaaatgctggcttcaatgcgcctgtgtgctaacgttcctgcgcaacacgccattcagaccgcgctaggtggttatcagagcatcagtgaatttattacccctggcggtcgtctttatgagcagcgtaaccgcgcgtgggaactgatcaacgatattccgggcgtttcctgcgtgaaacctcgtggtgcgctgtatatgttcccgaaaatcgacgccaaacgctttaacattcacgacgatcagaaaatggtgctggatttcctgttgcaggaaaaagttctgttggtgcaagggacggcattcaactggccgtggccggatcacttccgcattgtcacgctaccgcgtgtcgatgatatcgagctgtctttgagcaagttcgcgcgtttcctttctggttatcatcagctgtaatcttaatttcactgccggagattgcatccggcagcgttatcccgccacaatgacctgatgatgtcatcatacgtaaggtcactatgaaacagagccatttttttgcccatctctcccgcctgaaactcattaaccgctggccgctcatgcgcaacgtgcggacggaaaatgtgtccgaacacagtttgcaggtagcgatggtcgcccatgcgctggcagctatcaaaaatcgaaaatttggcggtaatgtcaacgccgaacgtatcgctttactggcgatgtaccacgatgcctcagaagtgctcaccggcgatctccctactccggtgaaatacttcaattcgcaaatcgctcaggagtacaaggctattgaaaaaatcgctcagcaaaaactggtcgatatggttccggaagagctgcgggatatctttgcgccgttaattgacgagcatgcatatagcgatgaagaaaaatcgctggtgaaacaggcagatgcactgtgtgcatatctgaaatgtctggaagaactcgcggccggaaataatgaattcttgctggcaaaaacgcgactggaagcgacgcttgaagcgcgtcgcagccaggagatggactacttcatggaaatatttgttcccagcttccatctttcgctcgatgagattagccaggattcaccgctgtaagcagccggagtctgcgtcgcatcaggcaataagcgccggatgcgacatcaggctcttgtcaaaacggaaacagcatcgggatcatcaccacacaaaccgccatcacgataatggtgaacggtacccccaacttcacaaagtcactgaagctgtaatttcccggacctaaaaccagtgtgttaacaggtgaagaaaccggtgtcataaaggcggcggatgctgccatcgccacgaccatcgcgaatggataaggcgacacccccatcgttttggcagcagccagcgcaatcggagccatcaacaccgccgtcgcggtattagagataaatagcccaataaccgccgacaagacaaacaaacaccccagcatcatatgtggcccgtaaccaccgccaatgtccatcagccctttcaccgccagcgcgacacctcccgttttctgtaatgccacagcaaacggcatcatcccaacgatcaaaataatgctcggccagtgaatggatttataggcgctttcagcatctatacagcggaatttccccatcagcaggcaggcgatgatagcggcaacaggattaggaatttcatctgtcagcattaacgccaccattagcaccagacagaaaatggcatggggtgcctggctgtgcgcgggtgatgcttcactcacctcttccggtaagttcagcgctacgaagtcgcggccctgtttggccagcataccgatcagtttccagttacccacaaccaggatgatatcgcccagcagcagaggctcatccgccagcgaaccttccagcgccacgccattgcgctttagccccaccacattcagtccgtagcgggtacgaaaaccaatttcgcgcaccgatttaccaatcagttctgactcaggaattaatgaaatctctgccatgcccacatcaagggcctggtcagaaaaatactcgccgcgcagtaccatcggctccagcaattgctcactacaaaattgccggagatcgacatcagccgcagacatatcaataagcaaaacgtcacgcgcgcgaaattcagaaaccccattaacgttcacgataacgcgacgaaaacgccgccagcgttcaacaccgatgacgttagcgccataacgctcacgtaatttgagatcatccagccgttgaccaatcattggcgatccggggcgaatagccagacgtcgcgcacgcccggtcagtcgatattcacggataagatcgcgaaaggttcgacgcgtccagccttcgcgctgcggggtctgggtatcccctttcagcatgaaacgcatcactaacatatacaaaatacccagcaccagcacgaccaggccaataggtgttacgctaaagaaactgaagccgtgatagccttcacgcagcaattcactgttgactaccaggttcggcggcgtcgccaccagcgtcatcatgccgctaatcagcccggcaaaacttaacggcatcatcagacgtgacggcgacgtttgcatacgcatggcaacgcttaacaccacgggaataaagatagcgacaacgccggttgaactcataaacgcgccaagccccgcgacggtcagcatcaacaaaaccaacattttgatttcactattgcccgcaactttgaccagccatgttcccattacggtggcaacaccggtacggaccaaaccatcgccaataataaacaaggcggcaatcaggacaacgttaggatcagaaaagccggaaaatacttctgggactgtcagcgttccgcttaatacaaacgcgacaataacaaacaaagcgaccgcatccatacgcactctgcccgtcgcaaacaagacgatggcaacggccagtaatgaaagaacccaaatcaattcaccgttcacaacttatccttgttaattgagggggatgacttgattctgccataaaaaagccccgacgagacggggctaaatcatgatcaggtgtttcactgaataataacatcgccatttggctgtttggtcacagtaatttgctccagactgtggaggaccaaatcgacctcattcaggcgcggggtatctgccggagcgttaaccgcaatgacatgacaacccgccgccaggccagaaagcacgccagcgggagcatcttccaccaccacacactcctgcggcgcaagccccagcagctgcgcgcctaacagatacgcatcaggttctggttttccgcgcttcactcgctcagcggttacaaacacctctggtgcgggaagcccagctattttatggcgcgctcgcgctaccggcatggagccagaagtcacaatggcccacggaatacctgctttattcaaatgactgagtaaggcgattgcccccggaagcgcggtaataccttcggtttccgtggcctcgatgtgctccagacgcgtaaactcggcggcaatatcagcctcggatttgcccgccataaaatggcgcagagaggtgatcgcctgtttaccgtgaatgaaagccagcacctcttccggcgctaacccatgacgtctggcccagttgctccacgcccgttctaccgcaggcagggaatccaccagcgttccatcaagatcaaacagaaaacctttgcaccgcacgcgggcctcctcaggcattgataatttgattaatttcgttggcgctcaaatggtactgacgcgggcaggcatgccacacattaagcatgcgctgatatttttcccacattggcgtctgggcgttaaaaccgtgagttccggcgtcaaaatgggtatagcgcccttccacattaaccataaagcggacataaccgaggtaacgtgcttcagtggcggcgtcaaagccgaggaaggtgacacgacgttcatcgatggattgctggtcctgcaaattagaccaggaaacatgcaacgcatgatacatctccataatgtcgatgatagtgcggcaggtttcttctttcagctcgccaaactcgcgatccaattcacgcatctgtaatccgtaaccacgctcaataattgtttgcaggcgacggtaacgttcagcatttgccggatcgagcatagtcatcatcttgtactgattagacaaaataagacgttgcgcgttggtcatttccattgttgactcctgtatcactctactacggtgaaaaaaaagaaggctgagtatgccttcttttatatgcgtaatcaggggtcaattacaaatcatcaaggaaagttttatccagttgtttgaaggcgcgcttaagcgtgtcagctaatgcctggtaatcaggcttgccttcaacgggtgccaacacctgtccagactcctgcaatttaccgcgaacttcataaaaccagttaaggattgcagggggtaatggcgtgacagaacgcttgcccagccaccacaatccctgcatgggtaaacttaaggcgaacagggcagtggcaactgccggcccaagctgaccgcccagggcaatctgccagcagagagtaaatacggcgatcggcggcataaaacggatcgcataacgcgtcatcttgataacgcgattttcgacaaagaccggggcaaggcgtttttccagcggccacgtctttgagtaatgctgtccccggcgaaacaagctaaaaaaattaacagaacgattatccggcgttgacatgcttcacctcaacttcacatataaagattcaaaaatttgtgcaaattcacaactcagcgggacaacgttcaaaacattttgtcttccatacccactatcaggtatcctttagcagcctgaaggcctaagtagtacatattcattgagtcgtcaaattcatatacattatgccattggctgaaaattacgcaaaatggcatagactcaagatatttcttccatcatgcaaaaaaaatttgcagtgcatgatgttaatcataaatgtcggtgtcatcatgcgctacgctctatggctccctgacgtttttttagccacgtatcaattataggtacttccatgtcgagtaagttagtactggttctgaactgcggtagttcttcactgaaatttgccatcatcgatgcagtaaatggtgaagagtacctttctggtttagccgaatgtttccacctgcccgaagcacgtatcaaatggaaaatggacggcaataaacaggaagcggctttaggtgcaggcgccgctcacagcgaagcgctcaactttatcgttaatactattctggcacaaaaaccagaactgtctgcgcagctgactgctatcggtcaccgtatcgtacacggcggcgaaaagtataccagctccgtagtgatcgatgagtctgttattcagggtatcaaagatgcagcttcttttgcaccgctgcacaacccggctcacctgatcggtatcgaagaagctctgaaatctttcccacagctgaaagacaaaaacgttgctgtatttgacaccgcgttccaccagactatgccggaagagtcttacctctacgccctgccttacaacctgtacaaagagcacggcatccgtcgttacggcgcgcacggcaccagccacttctatgtaacccaggaagcggcaaaaatgctgaacaaaccggtagaagaactgaacatcatcacctgccacctgggcaacggtggttccgtttctgctatccgcaacggtaaatgcgttgacacctctatgggcctgaccccgctggaaggtctggtcatgggtacccgttctggtgatatcgatccggcgatcatcttccacctgcacgacaccctgggcgtgagcgttgacgcaatcaacaaactgctgaccaaagagtctggcctgctgggtctgaccgaagtgaccagcgactgccgctatgttgaagacaactacgcgacgaaagaagacgcgaagcgcgcaatggacgtttactgccaccgcctggcgaaatacatcggtgcctacactgcgctgatggatggtcgtctggacgctgttgtattcactggtggtatcggtgaaaatgccgcaatggttcgtgaactgtctctgggcaaactgggcgtgctgggctttgaagttgatcatgaacgcaacctggctgcacgtttcggcaaatctggtttcatcaacaaagaaggtacccgtcctgcggtggttatcccaaccaacgaagaactggttatcgcgcaagacgcgagccgcctgactgcctgatttcacaccgccagctcagctggcggtgctgttttgtaacccgccaaatcggcggtaacgaaagaggataaaccgtgtcccgtattattatgctgatccctaccggaaccagcgtcggtctgaccagcgtcagccttggcgtgatccgtgcaatggaacgcaaaggcgttcgtctgagcgttttcaaacctatcgctcagccgcgtaccggtggcgatgcgcccgatcagactacgactatcgtgcgtgcgaactcttccaccacgacggccgctgaaccgctgaaaatgagctacgttgaaggtctgctttccagcaatcagaaagatgtgctgatggaagagatcgtcgcaaactaccacgctaacaccaaagacgctgaagtcgttctggttgaaggtctggtcccgacacgtaagcaccagtttgcccagtctctgaactacgaaatcgctaaaacgctgaatgcggaaatcgtcttcgttatgtctcagggcactgacaccccggaacagctgaaagagcgtatcgaactgacccgcaacagcttcggcggtgccaaaaacaccaacatcaccggcgttatcgttaacaaactgaacgcaccggttgatgaacagggtcgtactcgcccggatctgtccgagattttcgacgactcttccaaagctaaagtaaacaatgttgatccggcgaagctgcaagaatccagcccgctgccggttctcggcgctgtgccgtggagctttgacctgatcgcgactcgtgcgatcgatatggctcgccacctgaatgcgaccatcatcaacgaaggcgacatcaatactcgccgcgttaaatccgtcactttctgcgcacgcagcattccgcacatgctggagcacttccgtgccggttctctgctggtgacttccgcagaccgtcctgacgtgctggtggccgcttgcctggcagccatgaacggcgtagaaatcggtgccctgctgctgactggcggttacgaaatggacgcgcgcatttctaaactgtgcgaacgtgctttcgctaccggcctgccggtatttatggtgaacaccaacacctggcagacctctctgagtctgcagagcttcaacctggaagttccggttgacgatcacgaacgtatcgagaaagttcaggaatacgttgctaactacatcaacgctgactggatcgaatctctgactgccacttctgagcgcagccgtcgtctgtctccgcctgcgttccgttatcagctgactgaacttgcgcgcaaagcgggcaaacgtatcgtactgccggaaggtgacgaaccgcgtaccgttaaagcagccgctatctgtgctgaacgtggtatcgcaacttgcgtactgctgggtaatccggcagagatcaaccgtgttgcagcgtctcagggtgtagaactgggtgcagggattgaaatcgttgatccagaagtggttcgcgaaagctatgttggtcgtctggtcgaactgcgtaagaacaaaggcatgaccgaaaccgttgcccgcgaacagctggaagacaacgtggtgctcggtacgctgatgctggaacaggatgaagttgatggtctggtttccggtgctgttcacactaccgcaaacaccatccgtccgccgctgcagctgatcaaaactgcaccgggcagctccctggtatcttccgtgttcttcatgctgctgccggaacaggtttacgtttacggtgactgtgcgatcaacccggatccgaccgctgaacagctggcagaaatcgcgattcagtccgctgattccgctgcggccttcggtatcgaaccgcgcgttgctatgctctcctactccaccggtacttctggtgcaggtagcgacgtagaaaaagttcgcgaagcaactcgtctggcgcaggaaaaacgtcctgacctgatgatcgacggtccgctgcagtacgacgctgcggtaatggctgacgttgcgaaatccaaagcgccgaactctccggttgcaggtcgcgctaccgtgttcatcttcccggatctgaacaccggtaacaccacctacaaagcggtacagcgttctgccgacctgatctccatcgggccgatgctgcagggtatgcgcaagccggttaacgacctgtcccgtggcgcactggttgacgatatcgtctacaccatcgcgctgactgcgattcagtctgcacagcagcagtaatctcgtcatcatccgcagctttgcgctgcggatatctgaaccggaaataatcactatttccggttttttattctcttaatttgcattaatcctttctgattatcttgcttaactgcgctgcatcaatgaattgcgccatcccactttgcatacttaccactttgttttgtgcaagggaatatttgcgctatgtccgcaatcactgaatccaaaccaacaagaagatgggcaatgcccgatacgttggtgattatcttttttgttgctattttaaccagccttgccacctgggtagttccggtggggatgtttgacagtcaggaagtgcagtatcaggttgatggtcaaacaaaaacacgcaaagtcgtagatccacactcatttcgcattctgactaacgaagcaggcgaacctgagtatcaccgcgtacagctgttcacgacgggcgatgaacgcccgggcctgatgaacttcccgtttgaaggattaacctcaggatcgaaatacgggacagccgttggcatcatcatgtttatgctggtgattggcggcgcgtttggcattgtgatgcgtacaggaaccattgataacggtatcctggcgcttattcgccatacccgcgggaatgaaattctctttattcctgcgctgtttattctgttttcacttggcggcgcggtatttggtatgggagaagaggccgtcgcctttgccattatcatcgcaccgctaatggtccggctgggctatgacagtattaccaccgtcctggtgacctatattgccacgcaaatcggttttgccagttcgtggatgaacccgttttgtgtggtcgttgctcaggggattgccggcgttccggtgctttctggctccgggttgcgcatcgtggtgtgggttatcgccactctgattggcctgatctttaccatggtgtacgcctcacgagtgaaaaagaatcctcttctgtcacgcgtgcatgagtccgaccgcttctttcgtgaaaagcaggctgatgttgaacaacgtccgtttacctttggtgactggctggtattgattgtcctgaccgccgtaatggtctgggtgatttggggcgtgatcgttaatgcctggtttattccagaaattgccagccagttcttcaccatgggtctggtgattggcatcatcggcgttgttttccgccttaacggcatgacggttaataccatggcttcatcctttaccgaaggggcgcgaatgatgatcgcccctgccctgctggtgggtttcgccaaagggattttgctgctggtcggtaatggtgaagcgggtgatgccagcgtgttaaataccatcctcaacagcattgccaatgccattagcggtctggacaacgcggtcgcggcctggtttatgttgctcttccaggcggtatttaatttcttcgtgacgtccggttctggtcaggcggcgttaaccatgccgttactggcaccgcttggcgatctggtcggtgttaaccgtcaggttaccgtgctggcgttccagtttggtgatggcttcagtcacatcatttacccaacctcagcgtcgttaatggcaacgctcggtgtgtgcagggtggacttccgtaactggctgaaggtgggcgcgaccctacttggactgctgtttattatgtccagcgtcgtagtgatcggcgctcagttgatgggctaccactaaaaatgttaagagccgcaattgcggctcttttttcattctgccgtttcagtctctacggcttcatttttggcattgcgcttcatccacaacgctagcgctttcagcgagtctggagtgaactcatcgcagcgtgcggtgatttcttccggcgtcagccagcaaacttcactgacttcatcttcctgtagtgcgaagggaccgtgagagacgcagctgaacaatgcgccccagacacggcaatttttatcttcgaaatagaactgcccgtgctcggcaaaggggacaccggcaatgcccaactcttcttccgcttcgcgacgcgcggattccagcagttgctcatcggcctggactacaccgcctgcggtcgcatctaacatgccgggtaaaaagtcttttgtctcggtacgacgctggaccagaattttgcccatgccatcatgcacgacgatgtaagttgcacgatgacgcagacactgtgcccgcatttgttcccggctggcttgtgcaatgacttcgttctcttcattgacaatatccacccattcagtacttgccaaacgacgctgttccattatcaggaaaccttctttttctggcgctcttacggcgcattttgagttgtgggtaaattacggattaatcgcgacctgcgcaatgatactttgatcattgagtgcgattacactaagtacgtcattatccagcatgccataactcgccggattaccgcctttcggaatactcaccgagccggggttgaagtggaaaatctccccccgctgttctgccactggcagatgggtatgaccgtacaccagcacatcgttctggtttaaagcaggcagattttccgggccaaaaagatgaccatgcgtcaaaaacagacgttgtttttccagtaatacctgttgccacggcgcggttatcgggaaatgcagcagcatttgatccacttcgctgtcgcagttgccgcgcacagcgataaccttatgtgccacttcattaagccgttcagcgactttggctggcgcgtaaccctccggtaaagcattacgcgggccgtgattcaacacgtcgccaaggatcaccagccactgggcaccgctttgggcaaacaactccagaacacgttccgtcgccggtaacgacccatgaatgtccgatgcaaacatcagtttcatcactcactcctcgtcgaaaaaacgtaagctatgatactggattctgtcgttgctatcagccagattgcttcgccgaaagtgcaataaaacgctggacagacgctcgctgccactggaatgttgcataatccaccaggcgttctggcacctcatcgccatgtagtaccaggcggttaatcattagcgccagatcagtatcagcaatgcaccattcaccaaataaattcggctgacccagtactaacaaatgttctgccatcgcgaacagtttctctgcactggcttttccctcggccgttagtggcgcttttttcgcccccgcaaagacaacatccgtcggacgctcttcgcggatgggcatcagatcgctgcgcagccaggcctgaatctgtcgtgcacgcgcacgattttctaaatcaagcggataaatacgttcccaggtcggtggcgcaaatcgatcttccagatactccgcaatggcagaagattcactcaactcaaaatcatcgatttgtaataacggcacacggcgtgtctgaccgtaaccttgccacgtcggctgcaaatgttcaccgctgtcgaggtcgatggtcttgatatgaaacgacaggcctttttcctgcaacgccacccaggcggataacacataaggggagaaaaagtgggcatctgaccaaagcgtgatagcgggtttactcattatgtcctcggcaataaagggggctggctatcaaactatagagcctttttgtcactgtcacgtgacgaatactcacgtaagtcgccgcgctttctatacttgtggtgttcagatgattaaacaaccggagctgcaatgatcgatctctatttcgccccgacacccaatggtcacaaaattacgctgtttctcgaagaagcagagctggattatcgcttgattaaggtagacctggggaaaggcggtcagtttcgtccggaatttttgcgcatttcgcccaacaacaaaattccggcaattgttgatcattctcctgccgatggcggcgaaccgctaagcctctttgagtctggtgccattttgttgtatctggctgagaaaacaggactctttttgagtcatgaaacgcgtgagcgcgccgccacattacagtggttattctggcaggtaggcggactggggccgatgcttgggcaaaatcatcattttaatcacgcagccccccaaaccattccttacgctattgaacgttatcaggttgaaactcagcgtctttaccatgtactgaacaagcggctggaaaactcgccctggctgggaggcgagaactacagcattgcggatattgcctgctggccgtgggttaatgcctggactcgccagcgaattgacctagcaatgtatccggcagtcaagaactggcatgagcggatccgttcgcgccctgccaccgggcaggcactgctaaaagcacaactcggtgatgagcgttcggatagttaacagaaacaggttctcgtgtattatttcatcctaagtaaaacaacggagaacctgcaatggcacaacctgccgctattattcgtataaagaaccttcgtttgcgtacgtttatcggaattaaggaagaagaaattaacaaccgtcaggatattgttatcaatgtgacgatccactaccccgccgataaagcgcgcactagcgaagatatcaacgatgcgctgaattatcgcaccgtaacgaaaaacattattcagcatgtagagaataaccgtttctctttgctggaaaaattaactcaggatgtgctcgatatcgcacgtgaacatcactgggtgacgtatgctgaagtggagatcgataaactgcacgcgctgcgctacgccgattcggtatccatgaccttaagctggcagcgttaatcgccatatcgggaggctgcatgaacatagtgatcaccggagggacaggattaattggtcgccatttgattccgcgtttgctggagctgggccatcaaattacggtagtgacgcgtaacccgcagaaagccagttccgttctcggccctcgggtgacactatggcaagggcttgccgatcaaagcaacctcaacggcgttgatgcggtaatcaacctggccggagaaccgattgctgataaacgctggactcacgagcaaaaagagcgtctctgccaaagccgcgggaatatcacgcaaaaactggtcgatttgattaatgccagcgacacgccaccgtcggtactcatttccggctcggcaacgggctattatggtgacttaggtgaagtggtggttaccgaagaggaaccgccgcataacgaatttacccataaactctgcgctcgctgggaagaaattgcctgccgggcgcaaagtgacaaaacgcgagtgtgcctgctgcgtaccggtgtagtgctggcaccggatggcggtattctcggtaaaatgctgccgccgtttcgtcttggcctgggcgggccgattggctctggtcggcagtatctggcctggattcatattgatgatatggtcaacggtattctctggctgctggataacgagctgcgcgggccatttaatatggtttcgccctacccggtacgcaatgaacaatttgcccatgcgctcggtcatgcgctgcatcgcccggccattttgcgcgtccccgcgaccgccattcgactgttaatgggcgaatcttcagtactggtattaggtggacaacgcgcgctgcctaaacggctggaagaagcgggttttgcgtttcgctggtacgatttagaagaggcgctggcggatgtcgttcgctgatgtggtttacagcaaacatccgccagttaactcccggtgttacaggattagtggctttgcgcgataagatcgtctggtgaaagtcgggtcaccatcataactaactctctgtctaaacctctatccagcatctcctgagcaatacgcagggcttcttcgtgtttgccctgcattgcgccttcttcacgtaatctgtcagcaatggtcatcagtttctccttttcttgtggtgcgcgttccgctatctcaccaataaatgcacgaaaacgctgggcatcccctgtttgtaatacgtaattaaacagggcttttagctgtctgtcattagtgttccctgtaactagcagcgaaacaatttggtcgactaatcccaacagatcgcgctgacgaatatgtttctgaattaactccaacagcgccattttgcggtgttgcataatctcgtcatccggcaccacggtaatatccaccaacggaaaagccgatgaatatattttgcgggctatagcaggctcggcaaattcatcaagccagcagagtgaataaggataaggacttctgcaaccatgataaaacagcatcgggagcaccaatggaagctctttatagcccgcatcaagatggttttgcattgccgcaatggaataacgcatcatgcgaaaagccattaattcttccggcttactttggtgctctatcactacataaatataacccactccctcctgcgttttcacagaccacaagaggtcggaataatattgccgcaggtcttcatcaataaaactgtttggttccagtttaagcgtcgttaaatcacacagtttgcgcagcggcgcgggaagatgaatatcaataaaatcccgcgcggtgtctggatggcgtaaaaaagatttaaataccgcatcatgcggcgtggaagttgtcgatattgtcatggcgttccgtcacccctcaaatttaagatgacgcgacaataaccacgattaacacccaatgcagcaggcagtttttatctttggacagcgaattcagaagtatttttagcggactgtaacttttacatttcagcggaagctgactcgcaaattccccatgaaaatactccggcagcgttagccaccggagaggaaattatttcagcgatcccttaaggaaccgttgcagacgagggctttgcgggttgccaaataactgctccggcgcgccctcttcttctattttcccctgatggaggaaaatgacatgagtagaaacatggcgagcaaagcccatttcgtgagtcactaccaccatggttttcccctcttctgccagttgctgcataatacgcaacacttcgcctaccagttcaggatcgagcgccgaggtaggttcatcaaacagtaaaacttccggttccatcgccagcgcccgcgcgatagaaacacgctgttgctgaccgccggaaagatgcaccggatatttcccctgcgcacgttcgtctatcccgacttttgccagatacttcaccgcccgctcgcgcgcttcctgcttgctcaggcccaacacctgaatcggcgcttccatgacgttttccagcaccgtcatatggctccagagattgaagtgctggaataccatcgtcaggcgtgtgcgcagtaagcgcagttgatttttatcggcgactttgagttgaccgtctttgtcgcgcaccagattgatcgtctggccattgaccacgatcgacccttcactcggtttttcgaggaagttaatgcagcgcagaaaggtacttttccccgatcccgacgatccgatgatgcttattacatctccggcattcgcttgcagtgatacccctttcagcacttcatgttcgccgtagcgtttgtgcaaatcgataacgtttaatttattctcggacatcgtattctcagtgcgttgaagaaggtttcacatgctgcaaccagcgtttttccgctctgcgaaagaggctgatcaggacataagagatgattaaatagagcaccgcggcaatgccgaaggcggtaaaaggttgatacgtggcggcgttaatatcgcgggctattttcagcagatccggcaccgtggcagtaaatgccaacgcagtagagtgcagcatcaggatcacttcgttgctgtatgccggtaacgcaatacgcagcgcagaaggcaaaataatgcagcgatacattttaaaagtcgagaagccataggctctggcggcttcaatttccccatgcggaaccgaacggattgccccagcaaaaatctcggtagtgtaagcgcaggtgttaagcgtcagcgccagcacggtacagttcaggccactgcggaagaaagcgttaaggaattcggttcccttaacaatctcaagcgtgtacatgccggaatagaacaccagcaactgaacatacagcggcgtaccgcgaaaaatataggtaaataaccagattggaaactggatgtatttattactggagacacgaccaatcgccagaaacagcgccaggactccgcctatcactaccgacaaaataagcagccacagagtgatcgccacaccagtaaagcgataaccgtcggtccacagcagcggtttccagtattcatgtaagatttcgatcacaggtcagccctcttcacacccacggagtagcggcgctcaaggaacagcagcacaccattggaaacagtggtgaaaaccaggtaaatcacgccacagacgatggcgaaatagaacgggtcccaggtacttttgcctgccagttgggtggctttgaccacatcttccaggccgagtaacgaaaccagtgcggtagatttgaggatcacctgccagttgttgccaatgcctggcagggcgtaacgcatcatcgacggaaacatgatccgccgaaacacttgcccacgagtaaaaccgaacgccgtcgccgcctctatatgtcctttcggcactgccataaaagcaccacggaacgtttcggtaaaataagcaccgtagataaaaccgagagtgataataccagcgaccatcggatcgatatcaatctgcccgacgcccatcgcctccgtcaccgtgtttagcgcaatctgcaaaccgtagaaaatcagcagcatcaacactaagtccggcacgccacgaatcagcgtggtgtacccttcgaaaatcagccccgaaagccgattttgcgagagcttaccgccagcgccaattaaaccgatgattacagcgagcactacagagctgatagccagctccagcgtgacgagcgcaccctgtaaaataacacctgaaaacccatacaacatgctgcctgtcctgtcgtgtgtggtgaattaccgcctcttgtctccctccggttacccgaagggagcgggctttctttcaccgatggcgattagccaccataaacatcaaaatcgaagtactttttcgctaatttctcgtaagtaccgtcagcgcgcatttcggcaaaggctttgttcagtgcttcgcgcagttcgttatcttctttacgcaggcccatgccggtccctacgccaaacagtttttcatctttaacagacgggccaccgaatttgtaatctttaccgacaggttgtttgaggaaaccttcgctggcagcgacctcatcctggaacgcggcatcaatacgtccggcagtcaggtcagaataaatgttgtcctgcccctgatacgagacgatttcaatgccttttggtgcccaatgttcattaccgaacgtctcctgggtggtgccctgcaatacgcctacccgtttgcctttcagcgactcgactgtcggctgaatgtcagaatttttcgccaccaccaaacgagaatcggcagcgtacagtttgtcggtgaaggctatttcttgctgacgtttttccgtaatggaaagcgatgacatgatggcgtcaatcttcttcgcttttaaggacgggattaacgcatccagcggattttcgacaaacgtacattgcgtattgatgcgtttgcataattcctttgccagatcgatatcgaagccaaccagttcgccttgtgaattttttgattcaaatggcgcataggtcgggtcggtaccgatgcggatgttttgcggaatcgcagcaaacgccgcagttgcgctggagaaggccagaaccagagagagcgatagcaccagttttttcataatgtcctcaactgacagtctttttatagggaatatttacaggtttgttacacttatcgtgccataaaattgaccatcaaggcaaaatatcccgccccgttagacgtattatttttcattaaaaatgcttaagtatgcatttcaatgcaccacgatagtgcaacaaacctggcgtgcaccatgatgatcattccatcaggtacagcttcccagcgacgtatcagtcaccgtagacattaaagtcgaaatactttttcgccatcttgtcgtaggtgccgtcctgacgcagctcgccaagcgccttattgaaggcagccgtcagttcagcatcatctttacgtagccctacaccggtgccatcaccgaagtattttttgtcttttactgatgagccagcaaaggcgaaatctttaccagcaggttgcttgaggaatccttcgctggcagcaacttcatcttgtaacgcagcatccagacgtcctgcagccagatcggaatagaccaaatcctggttggcataggccaccacatccacgcctttactacgccaggtctcgttagcgtaagcttcctgggttgatccctgcagcacaccaacatgtttacctttcagtgaatccagcgttggctgaatcggtgaacctttggccgcaatcaaacgagaatctgcggcgtacagcttgtcggagaaggcaatctcctgctgacgtttatcggtaatggaaagcgacgaaataatagcgtcgatttttttcgctttcagtgaggggatcagcgcgtcaaagtcactggcaacccaggtacatttcacctgcatccgtttgcacatctcgttaccgagatcgatatcaaagccaacaaaatcacctttagcatctttcgatgagaacggtgcgtaggtggtatcggttccgatacgtaccgtctccggtagcgccgcatagctggaagccgctgtggagagaccgactaacaaagacagagcgagaatcgacttcttcatacataaccctcaagtgaaaatggcttttttatgttgtgtattgtgttgtgtgtttgcaggctctttcatgcaggtcttatgccatcttgacgacaacagtaacattcaacgttaaatatgttaataagacgttgcattattgtcctgaagttgaagatagcaggtatagcggttgaatcgcagcgtttcgattgaatggcagaaacaaaatgtcgaggatttgatcgcggttgcaaaattgccctgaaacagggcaacagcggagttatgcgccctgccagcgggcaaagagatcttcaggaagggttatcgcaaactggtcaagaacacgattaaccgtctgatttatcacatcatcaagggattgcgggcgatgataaaacgccggaacgggaggcataatcaccgcaccgatttctgccgcctgagtcattaaacgcagatggcctaagtgcaatggtgtttcacgcacgcagagcaccaacgggcgacgctctttcagcaccacatctgccgcacgggtcagtaagccatcagtatagctatggacaatgccggaaagggttttgattgaacagggtaaaatcaccatccccagcgtctggaaagaaccggaagagatgctggcggcaatatcgcgcgcatcgtgcgtgacatcggctaatgcctgcacttcgcgcagagaaaaatccgtttcgagggataaggtctggcgcgctgcctggctcatcaccagatgcgtttcgatatctgtgacatcgcgcagaacctgtaataagcgcacgccataaatcgcgccgctggcaccgctgatgcctacaatgagtcgtttcataaatagttgccctgtcagacttgcaggcagactttgcaggatttcggcgggagttgcaagtcagggtgccagaccggcaccctcagcgaaggcatcatccttcgttatgcatttcgagattttccacttcgttctgacgttgcactgctttggcgtcatcattacgtaacgtatcgaggaaatcgaggtagccctgatcaacatctttggtgacgtagacgccgttgaacaccgagcattcaaactgctggatatccggattttcagcgcgaacggcgtcgatcagatcgttcagatcctggaaaatcaacccgtcagcaccgatgatctggcgaatttcatcaacttcgcgaccgtgagcgatcagttccgtggcgctcggcatatcaataccataaacgttcgggaagcgaatttccggtgccgcagaagcgaggtacactttcttcgctccggcttcgcgtgccatctcgataatctgctcagaagtggtgccacggacgatggagtcgtcgaccagcaggacgtttttatcgcggaactcggcgcggttggcattcagtttacggcgcacggacttacgacgcagctgctggcccggcatgataaaggtgcggccaacatagcggtttttaacgaagccctggcggtacggtttgcccagaatacgagcaatttccagcgcgatatcacacgaggtttctgggatcgggatcaccacgtcgatatccagatcttcccattcgcgggcaattttctcgcccagtttcgtgcccatattcacacgcgcgctgtaaacggaaattttgtcgataaacgagtccgggcgggcaaagtatacatactcaaacaggcacggattgctgaccggattgtcagcacattgacgggtaaacaactgcccttcttcagtgatgtaaatcgcttcgcccggcgcgacgtcacgcaggaaatcaaagcccagcgtatcgagcgctacgctttcggaagcgaccatatattctgtacggttctcgtcaatatcacgttttcccagtaccagcggacgaatcccgtttggatcgcggaaagcaaccataccgtggccgataatcatcgccacacaggcatacgcgccgcggattaagcggtttgtggcagcaatggcagcgaaaatattgtcggcttccagcgggtagtggcggaagttgtccagctcgctggcgaagatattaagcagaatttccgagtcggaagtggtgttgatgtggcggcgtttttcttcaaacagttttttacgcaactcgtgagcgttggtcagattgccgttgtgggcaagcgtaatgccatacggggagttaacgtaaaacggctgcgcttcagaggcgctggagctgccagccgtggggtaacgcacatgaccaatgcccatattgccctgcaaacgctgcatatggcgagcttcaaatacatcgctcaccagcccgttcgctttacgcaaacggaagcagttattggcatctatggtgatgatgccggcggcatcctgaccgcgatgctgaagcaccgttaaggcatcataaatcgactggttaaccggcataacaccggcgataccgacaataccgcacatacgtctttttcctcgttaagccacatctcagagcacttacgctctgggcaagaaacttgacgagctttgcagataatcaaaaaaccatctgatgataaaactgaattgcgggatcagctgtgatttgctccagtcttcgcttttcgacaccccggtaaaggagtcgagaaagaagagaatggcagcaacaatcaacacaccgcgcaacgcaccgaaacagacgcccagcacccgatcggtgcctgacaaccccgttttctccaccaactggcctatcacgaagttcacgatagcaccaacgatcagggtagcgataaacagtaccgcgatggcaatcccatttcgaaccagttcgtcttcaaagcccgtaaaccagactgacaggtaagtgtagtaatgactggcaacaaagaaagcacaaccccatgtcaccagcgataacgcttcacgaacaaagccgcggatcaggctaaccagagaggaaaaagcaatcaccgcgattatggcgtaatcaatccagaccatatgtgtcccacgattttacgccctgtcatcctgttcggggcgcattctaacagaaaaagaaaacgtttgcgtagggatttccttcccgcgcatcaataaaaatggcgctgaaaaaatattcaacgccatcgactttttatgcctttgcggcatcgggcaatgcgtgtcggatgcggcgtaaacgccttatccgacctacggttctacccctgcgtaggcctgataagacgcgccagcgtcgcatcaggcaagaccgtattaattcggcgtatagcccattaccacgccacttaagccagaaagttgcttcaactcacccagcgaacctttcagcttatctttcgaggcatccggcccaaccagaatacgggtaattttaccctgcactggcgtggatggcgacgtataaacccgataaccggcaccgcgcagcttaccgacaatctcattcactttatcggcatttttcagcgcacccagttgcacaacataggctttacccgtcggtgcagctttttcttccacgaccggcttcggttctggcttcggcgcaggtggtgcttcaacctttggtttaggcggctccaccggtttcggcttcggtggggcgaccggtgcaggttccggttcaaactcggtgttattggctgcaatagtggccggatcgagcgacggtgctgcggcatcacctgcccgcacctcttccgctgcgccttccggcggctgcgtcggtaacgcctgggtggcggctggcatcatatcaggctcatcacgatcgcccgctttcggcaccagcgggatagccgcgaactcatcctgataatgttttttctgcccgtccagcagccctggaagtacaatcacccccagcgccaccagcacgatcgtgcccactaaccgattctgaaacttacttgccaccgcttctcctcgcgtcaatcacttccatgacatgtgcgaccgtgtggaaagaaccacacaccagcacggtgtcttccgctttagcgtccgccattgcggcatcccatgcctgcgcaacgctatcaaatgatttgccgttacccaaatgctcaagcagttgttctgccgtggcaccgcgcggcccttccagtggcgcacaataccagtcatcaaccacgcttttcaaccaggccagagttccggcaatatctttatcatgtagcataccgataaccgccagcacgcgcccgtttttcggtagcgctttcatacgcccggtgagatattccgccgcatgtggattatgcgcgacatcaaaaataacgcgtggcgactcgctcacaatctggaaacgtcccggcaaaattgcgctggcaatcccgtcgcgaatggcattttcactgacttccagcccgctggcacgcagtgccgccagcgctgttgcggcattcggttgcgggacaagcggcaacggcagattttccagcgtgccgtgagcatcgctaaacgcccagtcatgatcggtgacggaatagttccactcaacgccccgacgttgtaacagtgcacctttttcctgcgccacatcagcaatggtagaaggcatttccggctcaccgacaattgccggtttttcgctgcggaagatgcctgctttctcgcgaccaatactttcgcgatctggacccagccagtcggtatgatccagcgcaatactggttactaccgcgacatcggcgtcgacaatattggttgcgtccagacgaccgcccagccctacttccagaatcaccacgtcaagttgtgcctgcttgaacagccacaacgccgacagcgtaccgtactcgaaataggtcagggaaatatcaccgcgtgccgattcaatctccgcaaaagaggcggtgtgggccgattccggcaattcctggccctgcacacgtacgcgctcggtataacgcaccagatgaggcgaactgtagacgcccactttgtaccctgccgccatcagaatcgactccagcgtacggcaggtggtgcctttgccattcgtacccgcaacggtaaacacaaatggcgctggtttcaggacgccaagacgcgccgcgaccaggctcacgcgctcaaggccgagatcgatagttttactgtgcaggttttccagataagaaagccacgaagccagaggcgacgcggcttgaggagtgcgtttgataatcatggtatccgctgattcgttacggtgagaatagcaaaagggcagagccagtggccctgcccttatcagttatcaggcctcaggttcctgatccggtaccgggggtaccactacgccttcacgcggcgcttcaggattcggcgctggcagattcatcaacttcgccagaatgctcgccagtttcaggcgcatttccggacgacggacgatcatgtcgatcgcgcctttctcgatcaggaattcactgcgctggaatccaggcggcagtttttcgcgaacggtctgttcgataacacgcggaccggcaaagccgattaacgctttcggttcagcgatgttgagatcgcccagcatggcgaaacttgcagaaacaccgcccatcgtcgggtcggtcagcacggagatgtacggcaagccgcgctcctgcatttttgccagtgccgcagaggttttcgccatctgcatcagcgacatcagtgcttcctgcatacgtgcgccaccagaggcggagaagcagatcagcgggcagttatcttccagcgcctgctcaacggcacgcacgaaacgtgcacccacaacagaccccattgaaccgcccataaaggcgaactcgaatgccgcagcgacaaccggcattccatacagagtgcctttcatcaccaccagcgcatctttttcgccggtttctttctgcgcagatgccagacggtctttatacttcttggagtcacgaaacttcagcacatctttcggctcaagctcgctacccagctccacaaggcttccttcatctaacaggctatgcaggcgattacgcgctgtcatacgcatgtgatggtcacacttcggacagacctcaagattacgttccagctcagcgcggtataaaacctgaccgcagctatcacacttagtccacaccccttcaggaatgctcgccttgcgggtgggagtaatgttgcttttaattcgttcaatccagctcattagggacctttctgtctgaacctggttcgatgccagttttatctttggggacgcataatgccatttttgcccccaacagaccatgaatgttgcacattaaaacataacagcccgaaactttggataaaaaagtggtcgaaccgcggagttactttttattttgcggcgcgtgccgcagcgcgtttgtgacggattatttcgatgacgcccggcaaaatagaaaccacaataatcccgacgatcagcagcttaaggttatcctgaaccatcgggattgtaccgaagaaatagcctgcgtaggtaaaaagcagtacccacaacagtgcgccgatcacgttataagcggcgaaatgacggtacgacatgtggcccattcccgcaacaaacggggcgaacgttctgacgatcggcacaaaacgggcgagaataatcgttttgccgccatgtttctcataaaactgatgggttttgtcgagataactgcgacggaaaattttcgaattgggattactgaacaacttttcaccgaacaaccgcccgatagtgtaattgaccgcgtcacccacaatcgcggcgatcagcatcagcaccaccatcatatggacgttgagatcgttggtttccagtgatgccaacgctccggcaacaaacagcaatgaatcacccggtaaaaacggcgttaccaccagaccggtttcacagaacaaaattaagaacaaaatggcataaacccagacgccgtactccgcgaccagctctgccagatgcacgtcaatgtgcaggataaaatcgatgaggaaataaatcaggtccatatttgcctatgccttgtactcgtcatctttcaggctgtaactacgttggctacagcctgaaatgttccgagcattattctcgttagtccgccagaaatagcgggcccattggcggttttggaagatcataccggtcagggtaatccaccgcgaccagatacagcccttccgcttttgccgttgctgccgccagcgttctgtcctttgccgccagcaactctgctatccagctctccggctggttgtgggcaccgacttccatcaggctgccgacaatattcctgaccatatgatgtacaaaagcattcgctttaatatctaccaccacataaggaccgtgacgcgtgacattaatatgcataacgttgcgccacggggttcgggactggcactgcaccgcacggaacgaggtgaaatcattctcgcccagcaagcattgcgcagcccgatgcatccgttcagcgtccagcggttcgtaaaaatgggttacccctttactcagtaccgccgggcgcagccgatgattgtagatgatgtagcgataacggcgagccgtggcgctaaatcgggcatgaaaatcatcaggtacagctttaacccaacgcacagcgatgtcaccaggtaaattcgcatttacgcccaaggtccacgccgcgtctttgcgcagcgcggttgtttcgaaatgcacaacctgcccggtaccgtgtacccctgcgtcagtacgcccggcgcagaagacggtgatgggttcgttcgccacctgggagagcgccttttccagcttctcctgcacactgcggacttcgttctgccgttgccagccgtaatacttactgccgtcgtactcaatgcccagcgcaattttataaactggcggttgttgctggtcggacattagtacagatactcctgcaccagtttctcggcgatttttactgccatcagcgcgccgccaaagcgaacgttatcggccaccgaccagaactggacttgctccggcataccgtagtcattacgcacgcagccaacagaaagatgcggcgtacccgaagcatcacctacctgagttgggaattcgttctcttcagagagcacaatatcttcgccttgaacaaacgcatcacgcgcttcttctgctgccagtggacgcagagcttcaaagttgaccatctgggcatgaccgtagaataccggtgcctggacgacgctagccgaaatcatcagcccttcgtcctgcaggattttgcgtacttcgtcaacgatacgacgttcttcacgcacgctaccttcgctatccggcagtaacggcagcatgttgaacgccagctgacgcccgaagaaatcttcttcgtcaatcggaatgccgttgagcaatttcgcactctgccccgctaacgcatcgaccgcttttttgccctgggcggaggctgaaatcaggctggtaacgctgatacgtgataaaccgccctgatcgattaacggtttcagtgccgccagcagctggctggtcagactgtctggtacggcgatgacattccggttccggtaatctgtcagtacaaacgggtttacttccggcaccaccagcggtacgtcgggttcgagagcaaacaatccactgctgtcgatcaccaggcaacctgagttggtcgcttcttcaacccaggcagcggtagcttctttgcctgcgacaaaaaatgccagctgcgcctgcgtccagtcgaattcagcggcatcctgcacggtgattgtcttaccaccaaagcgcagttgttcgcctgcgctttcgttacgtgccagtgcataaatttccccaaccgggaactgacgttcagccagcgtttcaagcagggcttcgcccacagcgccagttgcgcccaggacggcaatgttccagccttcagacatggtggtttactccagaaatagcaaagctccctgccaatgttacagcagagagcatgaagaagagattaacgtgccggatgatgaacggcgttaaaacccagtttacacagcaatgatgccgcactggcgtcatcacaaattacatacagagatgaccattcacggcgctcaagatagtttttgcgcagtttatcgaactcacccggtatcccggcgactttacgcagcggtgcgtcatcgcggcgcacatcatacaccaaatgcaccagccttttcagcgtcggttgatcgagcgggccatgcagcgtaatgcgaccaaactctggcgcaggcagtaatgtatccagcgcaacgtgctgttcatgcccaataaacttgctataagcttcaaacacttgcgtagtaccgcgtgctttaccttccagggtatagcctgcgatatgcggcgtgccgatatccacttttttcagcagctcgacgttgagttccggttcgccttcccagacatccagcactacgcttaacttctggccttcattcaggcaggtcagcaacgcagtattatcgacgactgcgccacggcaggcgttaatcagaatcgctccgggcttcaggctacggatcagtttttcatccgccagatgtagcgttttgtacggaccatctttaaagagtggcgtatggaaagtcagaatatccgcgcgctggactaactcatccagcgagcggaaatcaccctcatccccacggtcggcgcgaggcggatcgcaaagtaaggttttaatccctaacgcttccagtcgcgcctgcaatcgacgtccaacgttaccaacgcccacgatccccaccgtacggtcgtacagtgaaaatccatcgcgttcggcaagcatcagcagggaggagaaaacatattccaccaccgcaatcgcattacagccaggtgcagcggaaaaaccaattcccgcctgcttcaaccatgcttcatcgacatggtcggtccccgcagtggcagtgccaacaaatttaatgggttttcctgccagcaaagattcattcactttcgtgaccgaacgcaccatcagcgcatccgcgtctgccagttgagcgacggggattggacgcccgggaaccgcggtcacctcacccaaacggctaaataagtcgcgggcataaggcatattttcatcaacaaggattttcacgtttgtgttacctgtatgagacgagagttaaccggacaagtgtgccataatctcgcggccaggcatacttgcgaagatttcaggtataaggatacgtaatgatacaacctatttccggccctcctcctgggcaaccaccaggtcagggagataatctgccgtctggcacgggcaatcagcctttatccagtcagcaacgtacttcgctggaaagcttaatgacgaaagtgacctcactgacgcaacagcaaagagcagaactgtgggcgggtatcaggcacgatattggtctgtcgggagattcaccgctgctttcgcgtcacttccctgccgctgagcataatctggcgcaacgtctgctggccgcgcaaaaaagccattctgcccgccagcttttagcgcaattaggggagtatttacgtctggggaataatcgtcaggcggtcacggattatatccgtcataactttggtcagacgccgctgaatcagctctcaccggagcaattaaaaaccattctcaccctgttgcaggaagggaagatggttattccgcaaccacagcagcgcgaggcgaccgaccgtcctttattaccggcggagcacaatgcgctaaaacagctggtgaccaaacttgcggcggcaacgggggaacccagcaaacagatctggcaatcgatgctggaactttccggggtgaaagatggcgagttaattccagcgaaactgtttaaccatctggtgacctggctacaggcgcgtcagacgctaagccagcaaaatacgccgacgctggaatcactacagatgacgctaaaacaacctttagatgccagtgaactggcggcgttatcggcatatatccagcaaaaatatggtctttctgcgcaatcatcgctttcttctgcccaggccgaggatattcttaatcagctttatcaacggcgggttaaagggattgatccgcgtgttatgcaaccgctgcttaatccttttccaccgatgatggacacgttgcaaaatatggcaacgcgtcccgcgctgtggatactgttagtcgcgattatcctgatgctggtctggctggttcgttaaccccgacgaaatgacagtatcgtgacaataatacccagcaccgcagagatcgccccggcaagaaataccgaagagtaaccaaacgtggtcgccagcattcccgccagcggcccggagacgccgagggcgatatcctgaaacgcggcgtaaccgcccagtgcggtgccgcgaacttgtgaggggacgcgtttaaccacctccacgcccagcgcaggaaagataagcgaacatccggctccggttaacgccgcgcccgctaatgcgacccatgcacctggggcttgccagagcagcaacaagcccaccgtttctacaagcagagagacaatcgccactttcacgccgccaaaacggtccggcatccagccaaacatgacgcgcatcacgacaaatgcgccgccaaacgcggtaagagtaaagcccgccatcgcccatcctttgctggcaaagtagagcgaaacgaaagtcccgataacagcaaaaccaacgccttgtagtgccagacctaaccctggtttccagataagcccgacaacgctccacagcgatggacgttctcccgccagggccggtactttgcgcactgtgccgttacaggcccacgccagtaagggtaataccattgtggtgatcgccagtgcggcaaaaccgtaatggctatgaatcaacaggccaagcggagcaccaacagcgagggcaccgtaaatcgccattccattccatgacatcactttgccagagtgttttggccctacgatgcctaacccccaggtcagagcgcctgtcagtaactggctttcaccaaagccaagaatcaaacgcccgatgaccaacagggcaaatttgaacggtgcggagacaggcaaaatcgccgccagcagcaacgcgccgccagccagaccacaagctaacatcccctgaagcgccgaacgttttgcgccatattgatcggccagtcgcccggcatagccacgcgtcagcaccgtagccagaaactgaatcccgacggcaatcccgaccatggtattgccatagcccagatcatgatgaacaaacagcgggataaccggcaacggcagccctacggtcatgtaggtgagaaaaaccgcaaaagcgatgcggaagagcgaaaaattggcagaagatcgtgtttcggtttggcttacagcagtcatgcattactccagaatgcagcgcaaggcgaggagtatccccgtctcatctctctggtttcagggttacagtgcgttggcaggatttaacgcgtacgtcttttcagaaggaaatcgacaaagcgggaagtttgcctggaacaggcggcgattgtcaatgatgtgaaaaagggaaccatcgggttcccttttgtgttagtgccggaggccgcattggcgcgtaacgtcggatgcgacgctggcgcgccttacccgacctacggcgaattaatctttcagcttgcgcattaccagcgtggcgttggtgccgccgaagccgaagctgttagacataacggtggtcagttcgcgatcggtcgtttcggtcacgatgttcagacctgcagcctgctcgtccagctcttcaatgttgatgctcggggcgataaagccgtgttccagcatcagcagagagtagatagcttcctgtacgccagcagcgcccagagagtgaccggtcatggctttggttgcagaaatcgccgggctcttatcgccgaacacttcacggatagctgccagctctttcacgtcgccaaccggagtcgaagtaccgtgggagttcaggtaatcgattggggtatcaacgccatgcatcgccatcttcatgcagcgtactgcgccttcgccagacggagcaaccatgtctgcaccatcagaggttgcgccgtagccaacgatttcagcatagatgtgagcaccacgcgccagcgcgtgttccagctcttcaaccactaccataccgccgccgccagcgataacgaaaccgtcacggtgagcgtcgtaagtacgggaggctttttccggggtgtcgttgtatttagtagacagcgcacccattgcgtcgaattcgcaagccatttcccagcacagctcttcgccgccgccagcaaacacgatgtcctgtttgcccagttggatctgctctactgcgttaccgatacagtgtgcggaagtcgcacacgcggagctgatggagtagttaacgccatgaattttaaacggggtggcgaggcaggcagaaacgccggatgccatcgctttggtgaccacatacgggccaaccgctttcaggccgcgcgggccgcgcattgcgtcagcgccgaacacctggaaacgcggggagccgccgccggaacctgcaatcaggccaacgcgcgggttattctggtaagcttccggagagaggcccgcatcagcgattgcctgctccatagaaaggaatgcataaatggatgcgtcgctcataaagcgcacaactttgcggtcaatgaggccagtggtatccagttttacgttgccccagacgtggctacgcatgccggaatccttcagctcctgagagaaagtgatccctgaacgtccttcacgcagagatgccaggacttcctgctggttattaccgatgctggaaacaatgcccaggccagtaatcactgcacgtttcattcaatacctctgtaagtcgcacatagagtaagtttcgaatgcacaatagcgtacacttgtacgccgaacaagtccgatcagccatttaatagagaaatttgcgcagccttacacacatcgctaagatcgagccaccgcctgtaagacgagtaacttacgtgaaacactactccatacaacctgccaacctcgaatttaatgctgagggtacacctgtttcccgagattttgacgatgtctatttttccaacgataacgggctggaagagacgcgttatgtttttctgggaggcaaccaattagaggtacgctttcctgagcatccacatcctctgtttgtggtagcagagagcggcttcggcaccggattaaacttcctgacgctatggcaggcatttgatcagtttcgcgaagcgcatccgcaagcgcaattacaacgcttacatttcattagttttgagaaatttcccctcacccgtgcggatttagccttagcgcatcaacactggccggaactggctccgtgggcagaacaacttcaggcgcagtggccaatgcccttgcccggttgccatcgtttattgctcgatgcaggccgcgtgacgctggatttatggtttggcgatattaacgaactgaccagccaactggacgattcgctaaatcaaaaagtagatgcctggtttctggacggctttgcgccagcgaaaaacccggatatgtggacgcaaaatctgtttaacgccatggcaaggttggcgcgtccgggcggcacgctggcgacatttacgtctgccggttttgtccgccgcggtttgcaggacgccggattcacgatgcaaaaacgtaagggctttgggcgcaaacgggaaatgctttgcggggtgatggaacagacattaccgctcccctgctccgcgccgtggtttaaccgcacgggcagcagcaaacgggaagcggcgattatcggcggtggtattgccagcgcgttgttgtcgctggcgctattacggcgcggctggcaggtaacgctttattgcgcggatgaggcccccgcactgggtgcttccggcaatcgccagggggcgctgtatccgttattaagcaaacacgatgaggcgctaaaccgctttttctctaatgcgtttacttttgctcgtcggttttacgaccaattacccgttaaatttgatcatgactggtgcggcgtcacgcagttaggctgggatgagaaaagccagcataaaatcgcacagatgttgtcaatggatttacccgcagaactggctgtagccgttgaggcaaatgcggttgaacaaattacgggcgttgcgacaaattgcagcggcattacttatccgcaaggtggttggctgtgcccagcagaactgacccgtaatgtgctggaactggcgcaacagcagggtttgcagatttattatcaatatcagttacagaatttatcccgtaaggatgactgttggttgttgaattttgcaggagatcagcaagcaacacacagcgtagtggtactggcgaacgggcatcaaatcagccgattcagccaaacgtcgactctcccggtgtattcggttgccgggcaggtcagccatattccgacaacgccggaattggcagagctgaagcaggtgctgtgctatgacggttatctcacgccacaaaatccggcgaatcaacatcattgtattggtgccagttatcatcgcggcagcgaagatacggcgtacagtgaggacgatcagcagcagaatcgccagcggttgattgattgtttcccgcaggcacagtgggcaaaagaggttgatgtcagtgataaagaggcgcgctgcggtgtgcgttgtgccacccgcgatcatctgccaatggtaggcaatgttcccgattatgaggcaacactcgtggaatatgcgtcgttggcggagcagaaagatgaggcggtaagcgcgccggtttttgacgatctctttatgtttgcggctttaggttctcgcggtttgtgttctgccccgctgtgtgccgagattctggcggcgcagatgagcgacgaaccgattccgatggatgccagtacgctggcggcgttaaacccgaatcggttatgggtgcggaaattgttgaagggtaaagcggttaaggcggggtaatctgctctcgcagtgtttgccggatgcggcgtgaacgccttatccgacctacgtgtgacgtgtaggcctgataagacgcgataagcgtcgcatcaggcatgctgctccagacgccgcaacttactgctgtgacgcctgctgaaacaggttttcccacatatcggtcaccagcgcctggtcacgcggcgacaattcaccagcaccaatggctttttccagactctggctaacggtcgtatgcaccgcctgagcggagtggtcatcaccactttccagttctgcgatggctaatgtcaggtggccacgcaaatacccactggcaaacaactcatcatcactggcatggtcaaccataccgtcgattaatgccagaatgcgtgattcaaactccgcgatcatcttctttcctcattgtaaaacgtggcgctggcttcagttgagcgcttccggccacgggaactgttccgccgtaagttccggcgtgtgataataattttgtagtgctttaatgaagcgtgccggacgttccggaatgccatttgtcagataatccatcacctgcgcatgtactcgccgttgaaacaccacacgatccggttcgaaatccccttccagattgtcgcaactgacgttaaacggatatcccgccgccacacagaacaaccagtcgagcgcctgcggcttcacttcaacatcttcaaactggctttgcgtttgggcatcgcgtccgtccgggcaataccagtagccgaaatcaaccagctcacggcgcgctttcccggcaatacaccagtgcgaaatctcatgaattgcgctggcataaaagccatgagcaaagacgattcggttatacggtacttccgcatcagcaggaagatagatcggttcgtcgtcgcctttaatcagacgggtattaaaatcatcggcaaagcagctattaaaaatttcaatcaactgctcgtagtggtgtgtactgttcattagttcatccccaaccagtggaggatctcctgtccgtggctgtcgtaaagtaatttggcactcatcaccgccgagacgataacaatcatcgggcggatcagcttttgtcctttgctcaacaccagtcgtgaacccatgcgcgcgccgaggaactgccccaccagcatgacaaagcccgtcgcccaaatcactttgccgccgagaataaacagcagtaaaccgccgatgtttgacgttgcgttgagtaatttggcgtgagccgtggctttggcgaggttaaatccgcacagcgtaacgaaggccagcgcgtaaaacgacccggcagccgggccaaagaatccatcataaaaaccgacgcagccaccggctattaacgcgaagggtaaaccgtacatccggcgctggcggtcttcttcacctagctttggcatcagcaagaaatagaggccgatacaaattaccagaatgggcaaaatctgccgtaagacatcagcctgaacgtattgcaccagcagtgcgccgctcattgagccgacaaaggtcatggcgatattgagtttctgatcgcttaaactaaccactttgcggcgaataaagtagatagtagcggaaatagagccgccgcaggcttgcagtttattggttgccagcgcattagcgggagacatccccgctgccatcaatgccggaatggtgagtaacccaccgccaccggcaatcgagtcgataaatcccgccagcatggcgacaaaaaagagaactcccagcaacagcggggaaaccataaacaggctattaaacgtttccattagatcacgtgctcatccagtagcgcctggcaggaaggcggcaacggaggcggtgtcttcttctcaggctttgttgttcccggttttggaggttcaaaccagctttgcagttctgccccgcaaccatcgcctgatggcggtaaaggttgatcttcacactccagactatcggcagggcaacgtaatcgtacatgcatatgcgcgcgatgctggaaccagggtcgcactttgcgcaaccagtcgcgatcggtgcccgcatcaaggcaaagttgttgtttaatcgccggattaacaaaaatgcgcgtgacgtctttgtcctgggcggcgagtttgatcaagctgaaaatttctggcttccacagcgtggagacaacgtgtttaccgtcgcgggaaactaagtccagtgcttgcgggcgcaagagctgcgcggaggtccagcgagttttcggcagttgcagaaagatatcgacatccagtccggtctggtggctggcatgaccgccgttgaaacgcccaccagcgggcatccccatatcgccaatcagcaccgtacccatgcccagattgctcacctggctactcagacgctgaataaacatcaccagatccgggtgaccgaaatagcgacgctgatcggtacgcatgacctgataatgttcggactgtatcggcaacgtgtcagcgccgacaatacagccattagaaaaactgcctatcgattgtgcgctacccggcacaggttgggttattttttgccacggcgtcgctgccaggctggcgctactggcaagcagggccagcagcgcaatcgcggttttgttcattttttaccagcgtggaatatcagtcttcacatcggcattttgcgcccgctgccgtaacaggtgatccattaatacgatcgccagcatcgcttctgcgatcggcactgcgcggatcccgacacagggatcgtgacggcctttggtgatcatctcaacttcttcgccaaagcggttaatggtacgacccggcacggtaatgctggaggtcggtttcagcgccatatgggcaatgatttgctgcccgctgctgataccgccgagaatgccgcccgcatggttgctctggaaaccgtctttggtgatttcatcgcggttctggctgccgcgcagcgccaccacgtcaaagccgtcgccaatttccacgcctttcaccgcgttgatgctcatcagcgcatgggcgatgtcagcatccaggcggtcaaagaccggctcgccaagtccggcaggaacgccactggcaacaacggtgactttagcgccgatggagtcgccctcttttttcagcgcacgcatcaactcgtctaacgcgtcgattttgtcggggtccgggcaaaaaaacggattttgctcgacctgcgaccagtctttgatatccagcggaatgtcgcccatctgggtcaggcagccacggatttcaataccaaatttctcggcgagatattttttggcaatagctcctgccgccacgcgcatggcggtttcgcgggcggaagaacgtccaccgccgcgataatcgcgcagaccgtatttttgttcgtaggtgtaatcggcatggcctggacggaaaacgtccttaatcgcactgtaatcctgagagcgctggtcagtgttttcgatcaacaagccaatgctggtgccggtagtaacgccttcaaaaacaccggagagaattttgacctgatccggctcgcggcgctgggtggtatagcgcgatgtcccagggcgacgacggtcgaggtcatgttgcaggtccgcttccgtcagcggaatgcctggcggaacaccatcgacgatgcagccgagcgccagcccgtgcgattcgccgaaggtggttacgcgaaagagttgtccaattgtgtttccagccatcacggctccgttattgttgtgtttgcgtgtttacttaatctttataaatcgcgaaatgttctcgtgcggcaataagctgctctttggtgagcataaacacaccatcgccgccgttatcaaactccagccaggtgaacggaacatccggatattgttccataagatgtaccatgctgttgccgacttcacaaatcaacacgccatcatcagcaaggtaatctgccgcgttaccgagaatgcgacgcgtcagtttcaggccgtcagtgccagatgccaggcccagttccggctcgtggcggtattcgtttggcaggtcggacatatcttccgcatcgacatacggcgggttagtgacaatcaggtcgtactgcactttcggcaagtcgcggaacagatcggaacgaatcggaatgacgttgtggatcagaccgtgttcttcgatgttctgttcagcaaccgccagcgcgtctggagagatatccaccgcgtcgacttctgcatccgggaaggcataagcacaggcaatggcgatgcagccgctaccagtacacatatctaaaatatgctgcggttgcttgctgataagtccggcaaatttattgttgatcagttcaccaatcggcgagcgcggcaccagcacgcgttcatcgacgtaaaattcatggccgcagaaccacgctttgttggtcaggtaagccaccggaatgcgttcattgacgcggcggatcacgcgttcaacaatacggtgtttttcgctggaggtcagacgcgcggtgcgcatatcttccggaatatccagcggcaggtagagcgaaggcaacaccagctgtacggcttcatcccacgggttatcggtaccgtgaccgtaccagatatttgccgcgctgaagcggctaaccgaccagcgcaacatgtcctgaatggtttgcagctcatttactgcttcatcaacgaaaattttatccacgtattcctccagggcatgatcgcaataatttcggcggctagtttgccatgaagatgacgataaatcagcattcacgcgcggtgagtgaggaaaaatacgttttaaacgatcgattgtgctacgagtcgggtaaactgtaggaaaattagaaatagagacagataaatgaaaaagaaaacaacacttagcgaggaggaccaggctctgtttcgccagttgatggcggggactcgcaagattaagcaggacacgattgtccaccgaccgcagcgtaaaaaaatcagcgaagtgccggtgaaacgcttgatccaggagcaggctgatgccagccattatttttccgatgagtttcagccgttattaaataccgaaggtccggtgaaatatgttcgcccggatgtcagccattttgaggcgaagaaactgcgccgcggcgattattcaccggaattgtttttggatttacacggtctgacgcagctgcaagctaagcaggaactgggcgcgttgattgccgcctgccgccgtgaacatgtgttttgcgcctgcgtgatgcatgggcacgggaagcatattttgaagcaacaaacaccgctgtggctggcacaacatccgcatgtgatggcctttcatcaggcaccaaaagagtatggtggtgatgcggcgttgctggtattgattgaagtggaagagtggctgccgccggagttaccctgagaagtttagcgcgttgcgccatgtacggggaatggcagggtcaaatgaccctgccttgtgaaaaagacgcactagtacatattcagtatgtaagtgaaccggcaggtggcatctattggctgttgcgccgttgtgtccacgcgtagcttcatatcatgcagttgcctggacgtgatcggttgcggctctggcgtcactgtcactttggcatcgtcacagcccgaagtggagaaggtcatctgctgtgcgacaaaacggcagtaagcaccacgctcgtcatatttactaccatcacacagttttccaccttccatcagataagtgggcagcgtttgttcaatcacagcacctgttgattgcatcctgactattttgttatgcacgaccgtattttcattccaggagacatcataaggatctaaaggtattgcgctacagtcagaactgacttttgtcgggccaatatagggaacattattacctgtatatattgcctccgttgcgtcctcactctttacatacgaggaaactatccacggacaaccatgcatatcaccgtcatagaaaactgtgactttcatttccacgcaggcccaggtcgtttgtggggtgcgagcatcatattcttcaaggcccgggcaacgtgaagttggtaatatggttcttgcgtcttctaaatgcagttccggagcagtaccttgaccagtccatgatactagtggcacattcaaaatcgcaactgacctggattgatataccccatattgcgcgccttctggtgtgaggatagaaagattaaactgaaaacctgtgagcactcccattgatcccgcaggaatgtataacgtcgcgatctttttcgcggcctgcactcctgtgctgaggcaaatgagcagcaaaaagtaaaagacataacgtagaattttcattttaaatatactcgaaggtagcggtcaggctggcagtgaattcaccgatcgtcacatcgcgaccgcttttcgcctggatccaggcccggaaattaatatcattgttgccgttggtaagcgcaaaagtcgccccggtagtgttgttaatatccacccgcttgccgtcgagcgtttccatccctatccccacgccctgcgcggtggaggtgtcatcgactgccagaaaacccggctgaccgctgtcttcggtgccgctcagcgtgactttgacgttgtagcccgctggccctttgcagtctttcagcttaaacacaaccggcagatgcacagactgtccggcgactatcaaatcccggttgctgacggtgggaaaatggatttctgccagattggcaccatccaccaccagcgtgcaggatttactcagcaggttgccgtaaaaatgcaggttgttatcgactgcccgtgcccccgtgctggcggtcagcagcaggcctgctaacagcgcataaccgggtgaataaatgtgtgctgttttcattggtaatccacccgtaaggttgcgtaagcagaaaaggtcgtgtccgtcagcaccgcatcagccgctttgaccggtaccgcctccagctttggcttctggctaaaatcggtggcgttaatggaaagcggctcgttgagcttaaaacgctgaccgtcatgctgaagctcaattccgaagcccggtacatccgtctcaatagcagagtcgttgtaggaggtggcagtccccgtccatgagagtgtcatattccactcgggatcgcggacatcagactcacagctcagttcgtagtccacttcctgacgaccataattgccgtcaatgctgtcgataatgagatcgcgaaattgcacttcgatggtttgcccgccgctgatgctacaggcgggcggcgacatcagcgtaccgtggaatgtgatgtcatcttccgccgccagcacagccccgcaaccagcgcacagtaaaaggagcaggaattttttcattggtaatccaccaccatggtcatcgtggcgttaaactccgacggcgtcagttgcaccccgctctgttttaccggcaccgctttcagctgaggctgtgtgttgacattaaaaggcgtccagttattttcaccaactgcaaacagggagttgtcggcggcgttttctatccgcacccccaggccggcgatatccgtgctgagaaccgtttctccgttgatcacggcggtattgcctttgagctgcatccgtaagtcatcgctgactttattaccgcagttgagggtgtatttcgcatcctgttggtaattggtaccatcgatcctgttgatcaccacattgccaaattccaccgcgcttcccttcacggagcacggcggcgggccatcgaccaggattcgcagcgtcagatccacctgtttgatatcgctgccagcaacggctaaaccgctgacaccccatccggccagtaccagtagccccgcgcccgctaaaaacttgtgactcataagtccctcccggcatcagcctttgcggctctgctcttcatccacctggcagttgttgccggtgcatttgaagtacagcggcatccgcgcgccgtagtcgttgatgtaggtcagcaccggcacgctgtccatcttcgcattcagcggtgcggaggttttcggctccatcatcagcggtgtgaatcccgccggcgggttgccgccttttttagcgctggcgttgctgatgatcacgtagtacggcgtcgggttattgacggtgaagtcctggccgttacggatgagcgtcaccttatgctgccacggacttttcatgctggtgttctccagcgccttcggtcgccagaacagtttgatacgcgtctgcagcgcaatctgcagtgtgttcggtttatttgatttcggcggaatttcgcgcacgttgaaatagaacacgctctcgcggtcggccggcagtttgttgatatccggcagcccctgcaccttcacctggccgttcatcatcgcatcgatgcgctgcactggcggaagcaccgcaagcggcgagctgattttgttgccctttgcatcctctatccagctctgcgccagataaggcagtttgggatcgttgttgcgcagcgtgacgctgatggacttgtcgctttcgttaaacaccagccgtgtcctgtcgggcgtcaccgaagcgtggctggagaaactgaccgctgtcgccagcagcgccagtgccgggacaacgatttttgcagtgttagtcagattaaacatggatcattccttaatcacgttactggtttactgaaattgaagtcgggggttccgttggcgtcacccgctgtgtctgttcctgaatcgccggtttgaccgccggcgaagtgacaggtgctacattgcctttatgctggcatggcagtaacaagccgttaaacagatcggcaggcagcgggtccggcaggttgatatcgcaatgcgcaacaccactccagaacacactcatgtgttcgccaggtttcaccccagccagataaacattgccgtcatcatcgacaaggcccactgtctgctcgttatcattttttacttctgcgccaaacggaggatggctgccgtcttgtaaacgcagcaccgccatcgctttttgaccactgatgacggcaaatttgcggtagccaatcgccccttcagttagcgtggcttgtaccaccgactgggttgcttcggcgttttccggcaatttgttgaggtcgatatacgcctgattgcggtaatagttattgacgtcagaaacgacggctttaccaaacatattggtataaacagcagccccgttaccttccaccggaacatcggcaacgccatcggcatcaatcagcaggcgtgtcccgcccatattctgggtacggtgaagtgcgccgccgtgggtagtaagcgttgcgccgccctgtaacgacaagcccgcagaggtgtattgcccttcatggtagttcgcactgaggtcaacctgcgccagcgaaccatcatggctgtagtagccatcaacgctggtgtgtttgtcactggtgccgatgttcaactgatagtgagtcgcgtcatcgacacggctaaaataaccgacctggctgctgtccgtcccactgccatagttgccgttatagctaacggtactgttgtcgccccacggcatactgagcgaaatgtacatgcccttatccgcccggttgtcatactcgtagcggtagccagtcagggaaacgctcatattacgaatgctgcccatattgaaatagtgggagagcatgatgttgtagtttgtctgctcctcacgatcccagtaggtatggcgggtatagttgagataaaccgaaacacccgcatcgcggaagttctggttataagtggcggtgtacatctctttgtcgttgcccgtacggaccatttcgctgtcactggcatccagatactcgctcatggtcataaagttctcttccgagaagcgatatccagcgaaagtgacgcggctgttgagctggtcaaagtctttggaataactcacacggaaggagttaccgtccagcgaacctttgccataagcggtgtctttatccagtttggtatgcgaatgagtaacatcaaacgcgaccgcgccgaaggtagacaaatcgcgaccgacgcccagcgccgcagactgatagttttcatcacccagcgcaccgccatataacgaccagccgttagcgatgccccaggaggcttcagcaccagagaaaaatcccccctcgacatggtggccccactcttgcggacgtcccatcatgatcttatagcgaacctggcctgggcgagtgaggtatggcatcgaggcggtgctgatgtcatattcctgcacctggccgttctgttcttcaatgcgaatatgcaacgtaccggagacggaatcaccaagatcctgaatacgaaacggtccagccggaacctgcgtttcgtaaatcacacgccccatctggctgacggtcacttttgctgtggtgtgtgccacgccggaaatgtctggcgcgtagccgcgcaggttgggaggcaacatttgatcgtcagtgctgacactgccaccaacataattaaaaccgtcgaaaatatcggaattgaggtaatcttcgcccagcgccagtttggcttttaatgacggtaacgcccgccaggcataatagcgactccactcccattttttttgtgtgtcatcgccgccaaattcatcgtcatcatcattactgcgcgtatgttgatagttggtctgccagtcagcgcgcatacgccatggccccaggttaaccccgaccgtcccgttgccgctgatctcgttactgtcatcgccgccattttcttcgtgtcgtgtttgcgcagtgatgctgtagtccgcaatgatcccggagatgccatcatcccaacgagaaggtggatcccagtcgggccaggtatattcgaggtaagcctgcggtagtgaaatgactaatgcggactggcttaaatcagccttaatttccatgccttccagttgaccgggcttcaggcatttaccatcgtggctccattgcagatttttcgccacgtcttcttttaaaccaaactgcgccaccagttccggtgtcagacaagcatagcttttgctaacgtcatcttcaccagcataccagtaaatatcgtactcttccgccaatggctgtttatttagttgaacctgtaaattgtattttccgggctcaacatacccctggctggaaaaacgcttcagatcaatttttgtgtcgccttttaattccagaaaacgggaatcaaactgaatgtcgtcttcagcccagacactgctataactccctgacattgccagcgcaatgcaccacggaagaatccgtaatcgaaaaagagaatggtcaggcatacacgtttttatccgtttttattcttgttcggtcaaaatccatttaaataccccatagcagtgtcgctatgggggtatgccttacaggtaagtaatctggaaggtggtatttgcttcgaaattacccagatctggcgcatcagctgcgccgaccagccaggctttaaagttcagagtctgcttcgctttgcctttattagtggcagtatctttcacgattttctggtcaatacccatgccgcttttgtaagaggtacccagagagtcaccgatcgccaggctaacattgttaaatgccgcaccggtatcggtattgaaaatggtgtaataattgccgctatttgcagaagaaacggtaccagtaaaggtagtggtcattgtttcctgagtatcaaatacgcaatcttgcaggcgaatctggaaatttttcggcgtggtggtgccgttatttttcagtttttcggcaccgatatcacccatatcaacttccagtttgtgatcgtccggaacgatagaacacactgagtcttcaatggtgccgtaaaaacgtgcagtaccgttgttacccgcagcgattgttgccgtagaggtgaacgcgcccatcaccattgccgcagcaatagctgttttaacaaacttactcattatttgtccttaaactataaataattaaaatataaacattgcaatacattgattcagtcaatagccaatgtttatacccagccattgaatacggcatgcgatccaaaaaaacaggtcgtaaaaaatgtattcgttggtgtggggtcgaatagtgatgttttcactcccctgattcaatttaattttactaatgagtaaatgtagatttaattaatatattgataggggaaagattatcttaaggatcttctaaaaaaacacgaaatatatatttagaaaaaacaggaagcatatcaacaatgaatgccaatagcttaaaaaacaaacaatgaacatataatgcgattggcattaacccgcttttgtcgatataatatataaacactatagccagaatttaatcaagtttcaattacgtcctgcctgattattcaactctattttctccattatctgtattaataaatgataatgagtgtcaaacagacattattcatttcaacatgtaactttgggcaaaatcaagatacgcgcagaagaatactttccgaatgaaagttaaaggtgttttatttatagatggggagagtcttcgatagtagtgaggttgacagatatccgctgcctgatgagcaattatgcccaatgaatctacctcattgggcataatttggaactcatcagatagcttttgccatcttcagattacacgggctcatctgccagttgaatgtgccgtttccgctttcatcaagcgttacgctggcaatggccgaggtggtaaacataggcggcgtttcgcccggacataactcggcaaccagatacccgactaacggtaagtgagagatcaccagtaccgaagcaacaccttcattggtcaacgcctgcaaataggcactgaccagaccaacatcgccgcagggcgttaactccggcagaacttctgcactggaaggcaggttcagacaatcccctacttcttccagtgtttgctcggctcgcaggaacgggctcaccagaacgcgttcgatttccactttttgacctttcagccagttcgccatcaggcgagattcgtcacaaccattagtggtcagaggacgaacggaatcactggcggcatcgagggctgcgtcgccgtgacgcatgataaaaacttgcatattgcaccgcttttgttaaccagattcgcccgttttctttcatctgaaaccagagaaagaaaacggtggccggcattgtgccttatccattcaccgaatgaaacgctgttttttacctcaatggcgtaagtatagtcaatatgcgtttacattttgaccaacactccgccattcagcgcggattcatatagctttgaccttcttattgcaggtcagttgcagttgttttccaaaaactttccccacgcgcgcccatctcgatcaaacgctcgcaaggggtaaaacgggaaccatactgcgtggcaagtcgttgcattattgcaaccacttcgcccgcgccgagagaatcgatatagcggaacggtccaccgagaaatggcggaaaaccaatgccaaataccgcgccaatatccccgtcacgcacgctacggataacctgctcatcaacacaacgtactgcttcattcagcatcaacatcacacaccgttcagcaacctgcggtgcggagattcgcccctgcccttgtgtgccaatcagcgggtaaatggcgggatcgacctgttttttgcttttacgccctttctgaccataaagatagaaaccccggccattttttctgcctttgcgatcgtcgttcaaaattgaagaaacaacatttgcaggcgcgctaaaacgttctccataagcggcttccagtacaggaataattttagtcccggtgtcgattcctacctcatccaaaagttggattgggcctaccggaaaaccaaatttcactagcgcggcatcaatgtgctctacccgttcaccttgggtcaacatgcggatagcttcattaatgtaaggcgctaagatgcgattgacgtaaaaaccggctttgtcacgcacgacaattggcgttttaccctgttttttcgccagttttactgtggtagcgatggtttgcgccgatgtccccgcatgaggaataatctccaccagcggcattttttccaccggactgaagaaatgcaggccgataacttgctcaggtcgcgtggcgtgagcggcgatatcaccaatcggtaaagatgacgtattcgaagcaaagatggtatgagcggcgcaattttgctcaacttccgccaccatctgttgtttcaattcgagattttcaaacaccgcttcaataatcagatcgcgatgggcaaagccgcgatagtccgtcgttccggagattaatgccagctgtttgtcacgttcgctggctttgagatgacgacggcgaactttgccctccagctgatcccaactgtacttcagcgcatgatttatgccctgcgggttgatatctttaattctgaccggaatccccgctttacaagcagtgacataagcaataccgccgcccatcaagccaccacctaaaatccccacgctgtttaatggcgcaggcggcgcatcactgccgggatctttcttcacgtccgtactggcaaaaaagatactacgcagcgcctgcgattgtggcgtcatcgccagttcgccaaacgcccgagcttcggcgtcataaccgctgctggtgccctgcgctaatcccgtttcaacaacctccaggatgcgttctgtcgccggataattgccttgagttttgtgttctgttttcttgccgaccattttgaacagcagcgcacgacctaacggccccgccagaatacgctcgcgtacaggtagagggcgggaagatgggcgctccttctttgccagctcaacagcggcttccagcagaatggagtgcggaacaacgtcatccaccagccccagctttaatgcctgtttcgcccgaagttgttttccggtgaggatcatctctaatgctgtgctgacgcctatcagacgcggtaaacgctgggtgccgcctgaaccgggtaacaatccaagttgtacttcaggcaaaccgagcaccgttttaggatcgtcagtacaaacgcgaccgtggcacgccagcgccaactccagcccaccacccaggcaagcgccatgaatagccgcgataacctgaatgggcaaagcatgaatctccgccatcaactgttggccctgccgcgccagagcttccgcttcttgcgccgttttgcagttgccgatcatgttgatgtctgcgccagcaatgaagttgtccggtttagcggagacaaacaccacgcctcgcaactctttgttttcacggagttgcttaataatggcgcgcacctgcgaggcaaactccgccttcagggtattcattttctcacccggtacgtcgatggtgataacggcaatgttgtccagacgaacattaagggtaaacgctgatgtcatttccattattccgcctccagaaccattgccgcgccaagcccaccggcagcacaggcggtaactaaaccaaatccaccgccgcgacggcgaagttcatgcaatgtctgggtaatcatccgcgcgccggtcgccgcgaagggatgcccgtaagcaatcgaaccgccaagcacgttaaatttgctatcgtccacttcgccagtggcatgtgcacgccccagtgcttcacgagcaaaacgttcactacccagcaactgaatattcgccagcgtctgagctgcaaaggcttcgtgcatatcgatcaatgtcagatcgctcatcgtcaaaccggcacgctccagcgccagcggtgttgaccaggctggaccgagcaacatgtcctgccagacatcaatcgcagtaaatgcgtagctgcgcagataccccagcggcaccagccctaattctttcgcccgggattcagtcatcaggatcaccgctgccgcgccatcggtcagcggcgtactgtttgccgccgttaccgttccgtgtttgcgatcaaacgccgggcgcagctttgcgtaatcggcaagcgaggaattaccgcgaatattgttgtcttcgacaagcggttgtttataaggagggataaaggcagtcatcacctcttctttgagttttccgtctgaccatgcctgagcggcacgctgatgcgaacggtgcgctaatgcatcttgctgttctcgggtgatgccgtaggttttcgccatttgctctgcggtgtcgcccatccgcaagccggtagaatattctgctaccgcaggtggtacgggcattaagtcgcgcaaacgcaggcgagagaagagtttcagtcgctggctcatggtacgagctttgttgacatcaaccagcacgcgcgccagttttttactgacgccaattggcaataccgaagaggaatctgccccaccggcaatccccgctcgaatagttcccgccatcaggctttctgcgacgtttgcaactgcctggaaactggtagcgcaagcgcggctgacgctgtaagcatcggtatgtacattcattcccgtaccgagaacaatttcacgcgcaatgttgggggcttcaggcatttgtacgacctgaccaaagaccagttgttcaatcacttcggcggggatctcgctgcgtgccagcagttcgcctaccaccatcttccctaaatcaaccgcgggaatgccatgaaaagccgtcgcctgacgggcaaaaggcgtacgtaaaccgctaacaatggcgatacgatcgccctggcgggtaaccagcggtaaaacctgacccataacactcccctgtaaaaaaataaataaagtggtctgacctgatcatagtcttaaccatttttttacatttagccaagtggagaaaagggaaagtgggagctatgacacagagagaaaagaagaagagaaaagaaaacgcccctgccagcaactgacaggggcgtacgtacccgagaggaattaacgcagacccagctggaaaatcagcatttcagcttcgcaggcaaaagtgaaatcgatatccaggcgcacaccgtcagactcttcagtgaaagtcggggtgattttgcaaggttcagattccacgctacgggctttttcagtcagcgccgccagcgtttgctctgcttctgcgcggtttgcaaacacgcggctgtaagacgcggtgcagtcggagttgtccataatggtgccaacatccatacagcagcaaaccggggtttcatcagcactacatttactcatcgttgatttcctctgtatgtgcacccaaggtgccagataaacgttgtggatattttacgcttccggaaagtgctgctccagttgttaattctgcaaaatcggataagtgaccgaaatcacacttaaaaatgatctaaaacaaaattcacccgaatccatgagtgcgccacctccaaattttgccagctggatcgcgtttcttagatcatatttgaaaaaagatagaaacatacttgcaacattccagctggtccgacctatactctcgccactggtctgatttctaagatgtacctcagaccctacacttcgcgctcctgttacagcacgtaacatagtttgtataaaaataaatcattgaggttatggtcatgagccagaaaaccctgtttacaaagtctgctctcgcagtcgcagtggcacttatctccacccaggcctggtcggcaggctttcagttaaacgaattttcttcctctggcctgggccgggcttattcaggggaaggcgcaattgccgatgatgcaggtaacgtcagccgtaaccccgcattgattactatgtttgaccgcccgacattttctgcgggtgcggtttatattgacccggatgtaaatatcagcggaacgtctccatctggtcgtagcctgaaagccgataacatcgcgcctacggcatgggttccgaacatgcactttgttgcaccgattaacgaccaatttggttggggcgcttctattacctctaactatggtctggctacagagtttaacgatacttatgcaggcggctctgtcgggggtacaaccgaccttgaaaccatgaacctgaacttaagcggtgcgtatcgcttaaataatgcatggagctttggtcttggtttcaacgccgtctacgctcgcgcgaaaattgaacgtttcgcaggcgatctggggcagttggttgctggccaaattatgcaatctcctgctggccaaactcagcaagggcaagcattggcagctaccgccaacggtattgacagtaataccaaaatcgctcatctgaacggtaaccagtggggctttggctggaacgccggaatcctgtatgaactggataaaaataaccgctatgcactgacctaccgttctgaagtgaaaattgacttcaaaggtaactacagcagcgatcttaatcgtgcgtttaataactacggtttgccaattcctaccgcgacaggtggcgcaacgcaatcgggttatctgacgctgaacctgcctgaaatgtgggaagtgtcaggttataaccgtgttgatccacagtgggcgattcactatagcctggcttacaccagctggagtcagttccagcagctgaaagcgacctcaaccagtggcgacacgctgttccagaaacatgaaggctttaaagatgcttaccgcatcgcgttgggtaccacttattactacgatgataactggaccttccgtaccggtatcgcctttgatgacagcccagttcctgcacagaatcgttctatctccattccggaccaggaccgtttctggctgagtgcaggtacgacttacgcatttaataaagatgcttcagtcgacgttggtgtttcttatatgcacggtcagagcgtgaaaattaacgaaggcccataccagttcgagtctgaaggtaaagcctggctgttcggtactaactttaactacgcgttctgataacgcgttcgcctggataaagtcacctgcatagcaggtgactttaactcccccacttcaccgaaagtagtgtcctcattgcttacctcctgagttttgcaaacagcctgttggcagcttgccctttcaaatcaataagcggtatccacagacaaacctgaagggaaaggcatattttcaggcgttctgctcgtccttctcaaagagtttacttttctgcatttccaggatactccccccccctggctattgtgcgctcatacactcaaattaaagataggttctaaataaatgagcgttttttgatagtctatttcattaggtaatatatatttgtaacaaatcaatcaaaatggaataaaatcatgctaccatctatttcaatcaacaataccagcgcagcttacccagaatccatcaatgaaaataacaatgatgaagttaatggattagtacaagagttcaaaaacctttttaatggtaaggaaggaataagcacctgtattaaacatctacttgagcttataaaaaacgccatacgagtaaacgacgatccttatagatttaatattaataattcctcagttacttatattgatattgactccaatgatacagaccatattactattggtatcgacaaccaagaaccaatagaattacctgcgaactataaagacaaagaactcgtccgtactatcattaatgacaacatagttgagaagactcatgatatcaataacaaggaaatgatcttcagcgcattaaaagaaatatatgatggagatcctggttttatcttcgataagatatcacacaaactcagacatacggtaacggaatttgatgagagcgggaaaagcgaaccaacggacttatttacctggtacggtaaagataaaaaaggcgactctctcgctattgtaattaaaaataaaaacggaaatgattacttatctctcggttactacgatcaggacgactaccacattcaaagaggaattcgtattaatggtgatagtctcacccaatattgtagtgaaaacgccaggagtgcttcagcgtggtttgaaagcagtaaagctatcatggcagaatcatttgcaactggttccgatcatcaggttgtaaacgagctcaacggggaaagactgagagaaccaaacgacgtttttaaacgttatggtcgagcaataagatatgattttcaagtggacgatgcaaaatataaatgcgaccatctaaaagaaatagtttctactttagtcggtaacaaaattaacgttggccattctcaaaaaatatataagcattttaaggatctcgaaggtaaaattgaagaaaggcttcaaaatcgccaggctgaatatcaaaatgaaattaatcaaccatctgcgccaggtgttaattttgatgatatttaaaattatttttccagttttttgatttttcaacagctgaatatcggaaatagtcagtgacgaacatcagtatttttacataattacgtctaggtcattgtcggtttatctccttttacttgtggtaattgagggataacaacaaaaaaggtgagttttgcgactcaccttttttatttgtttcttattcagaatcaatatcttttaaatcatcctgaatcgcttgtgcgttcggattttcctgcggtttgagttcgccgccattagcgatgaaatcatgacgctggaagtacgcttcgcgcaccataatataaggatcggacgactgacgcagcagaccatcggaatccagcagctgagcgcgggtttcgatcccttcaagcgtccatttacccacagacatcggccaggtcagccaggaaagaaccgggtaaagaccatccgccatatcaccaccgtcatcacgcagcgtgaagctaccgtagaacggtaactgaacgtaaggcccataacccacgccataatgaccaagcgtactaccgaagcggtgaggttcagtccgttgcagtttcgggttcgccatccctgcaacatcaataaagccgcccatccccaaaatggtgttcaggaaaaagcgggtaaagtggaccatcccctgataagggtcgccctgcaagaagtagttaaccatcaccgcaggttcttcaaggttgccagtaaagttgctcaaaccattacgcgccggttgcggaacataatcacgccaggcgacagcgaccggtcgaacaatatacgggtctaatacgttgaagttgaagttgtacatggtgcggttgaacccttctaacgggtcagaacgcccttgctgatctgtaccggaactcgcacaccccaccagaagcgtagttcccagagcaagcgccgacaggcgaagcttcataaatgtctccctgtttttttatggcttatgcagtttgccatccatgacggaacgataccgtatccgcctgtttaggtgtgggcgattgtaacagcacgtcaactgatgtccagacgccctgatttgctgatttgatcatagcctggtaatcgccgccctgtaggctacttgattctatagaaacagaaaaaggcaaacgcagccttttctacattttcagagtaactcccgtcagttgcgagcaaaaaagccgctacgctttagctatacgtgctaattcaagagaagagaccatggacaacgacaaaattgatcaacacagcgacgaaattgaagttgagagcgaagaaaaagagcgcggcaaaaaaatagaaatagatgaagaccgactcccctcccgggcgatggcaattcatgagcatatccgccaggatggtgaaaaagagctggaacgcgacgcaatggcgctactgtggtcagccattgcggcgggtctgtcgatgggcgcttcgttactggcaaaagggatatttcaagtcgaactggaaggtgtgccgggcagcttcttgctggagaatctcggttatacctttggttttattatcgtcattatggcccgccagcaattatttaccgaaaataccgtgactgcggtactacccgtcatgcaaaaaccgacaatgagcaacgtcggcttacttatacggttatggggcgtcgtgctgctgggtaatattctcgggacaggtattgcggcgtgggcatttgaatatatgcctatcttcaatgaagaaactcgcgatgcatttgtcaaaatcggcatggatgtgatgaagaacacccccagcgagatgtttgccaacgcgatcatttccggctggctgatcgccactatggtttggatgtttcctgcagcgggtgcggcaaagattgtggtgattatattgatgacctggcttattgccctgggtgacaccacccatatcgtggtcggttctgttgaaatcctctatctggtgtttaacggtacgctgcactggagcgatttcatctggcccttcgcactacctactttagcggggaacatctgcggcggcacctttatcttcgcgttaatgagtcatgcacagattcgtaacgacatgagcaataagcgtaaagcagaagcacgccaaaaagcagaacgtgcggaaaacattaagaaaaattataaaaacccggcataaatggcgagggtttaagcaatcgagcggcagcgtacttaccccgcactccattagcgggtatactcatgccgcattgtcctcttagttaaatggatataacgagcccctcctaagggctaattgcaggttcgattcctgcaggggacaccatttatcagttcgctcccatccgtaccagtccgcaaaatcccctgaatatcaagcattccgtagattcacagttcgtaatggttcgcgtcagatcgttgacagccgcacaccatgacgggtaaaaagtggataaaataattttacccaccggatttttacccatgctcaccgttaagcagattgaagcagcaaagtcgaaagaaaaaccataccgccttctcgatggtaatggcctgtacctttatgtccctgtatccgggaaaaaggtatggcagcttcgctacaagattgacggtaaggaaaaaatactgaccgtaggaaaatatccgcttatgactttgcaggaggcaagggataaagcatggactgcgaggaaagacatctcggttggcatcgatccggtaaaggcgaaaaaggcttcgtctaacaacaattcatttagtgcgatttacaaggaatggtacgagcacaagaagcaagtctggtcagtaggctatgcaactgaacttgccaaaatgtttgatgacgacattttacccatcatcggaggtcttgagattcaggatattgagccgatgcaactgctggaagtaatccgcagatttgaagatcgcggtgcaatggagcgagccaacaaagcccgcagaagatgcggcgaggtttttcgttacgctattgtcaccggaagggctaaatataacccggcacctgaccttgcagacgccatgaagggataccgcaagaagaacttcccgtttcttcctgcagaccagatccctgcattcaacaaagcactggcaacattttcaggaagtatcgtatcgctcattgcgaccaaagttttacgctacactgccctaagaacgaaagagcttcgttccatgctatggaagaacgtcgattttgaaaacaggattatcaccatcgacgccagtgtgatgaagggacgcaaaattcatgtggtcccgatgtcagaccaggtggttgaacttctcactacgctaagctcaatcaccaaaccagtatcagagtttgtttttgccgggcgcaacgataagaagaagccaatctgcgagaacgcggtattgcttgtgatcaaacaaatcggctatgagggtctggaaagcggtcacggattcaggcatgaattcagcacgattatgaacgagcacgaatggcccgctgatgctattgaagtgcaactggcacatgccaacggcggttctgtgcgtggaatttacaaccatgctcagtatctcgacaaacgcagagaaatgatgcagtggtgggcagactggcttgatgggaaggttgattaaagaacaataacagcgcgttgcagcaattacaggaaacatcttgttacatacttggttttatgtcactaacaaactagagaaattatgcatgaatagacatatcgatcgttatttttgttggtgatatacttaactgaattttatgcacaaccatgttgcgaatttaccacatcattacaaggcaaacggaaatgaataaggataaatgcttaaatataattatattaataatcattataacaataattgttatttctttttatcctatgtcatcaagctcaaaagggcatgatacgcaaagtatttcaggtgacaactttaaattaagatcttctttctcaagagaatattcatcatgcatatcaaacctcaaaatgatagcgctagactttgctggtcataacatagatttcaacagccatagccagttcatagcttcaagtggcgaggaaaaaatattagtaaaatgcacaaaagataataagttactatacatgcaaaataaatgagaatttccgcacgcttatcgcgtgcggttttttattttttaggtaatatatagtatattaccttatatgaaaaatagacaaatgatacagttattatatttttcaagaaaataaataaaaagaattcaagactctcccttgccataaaaaatgaaaaaggcattgtcataagtgcagctatttgtaatacaccaactctcctcatcaatatgattttatcaagaaatctaaaaacaacgcctgagataacatatgagcaccagaaaaaatactttccgaaaataacaagcgatgacccaagcaaagttgatgccatattcaatccattgctaagaccaagagcactcacggtaaagtaatatgagctattcattgtgacaattggtttgtcagaccatatgaatcttgggataaaccctgaaaattgagtaaagaaataataaataccaccaacattgcgatcattgctaaagtatttaacagctatactctgataattgataggagatacgctatcagctaaatatctgactataatgccaaaaagagagccagacgctgaaatatcaacatctgagtatctcactatagccattacaccaattagaattaagcacacagagcctatgcatattaatttcaacatgccaattaagcctctagagtggcaaataagagcaacaataaacattgccgaaaacattacatttcttgagccaccaataagtacgtaatatgccatcccaaataacaatgacattataattgatttaacgaacacatacttatcgtcagatgtaattgcatacactataacagcagaaacaaaagatgacattatcattataatgacaccactaccagcattcccgccaagctttaaagcataatcatcagaattaaaagatatgccgtttatggcataaaaagccatcatcccaacaaaacttaaaaacaacgttgttcttacaaataattttgggctaccaataaaatatttatcagaaaaagttattttatttcttcctgccgctgtatgagagaatacataaaacaaaactataccaataaacgacaacgtagacacatcatttatatattgatacggcatatattctgcagaactaacttttgccccaactctaaacggaagcgatatatacccaaaaaaatgagtaaaaacgaggaataacatcccaacagatttgaatgacacgccatgttttttgaatgacacggcacttagatatattaatattatggcatacaacgcaggtagcacataagtaaaaaatgattcataaatattcataatattgtatgtaaaaatgactatttttacccgatctttaaagaaagtacaggatgatagcgcgtttctacgcgccatcatagtcaccttacaacaaatttgccattgctaatgtcgttaactagtgttgccactatgttagcaacatccttcgtagatagggtgtttacgtctccaccgcgtaacgcaccggaattggtaaatggatactgctgaggttgtgagctattggcaaactggttgttagcctcataacgttttgttggtacagggttgtacccaatactgcctgtggttgtgtcaggagccacgcagttcgtaatgttcactatagcggcagaaccactaccatttgtatatattggcctgttaactgtcccgaatggttgcacagctaccagtctgttaacaataacactatgtgtggctagtgcctgtaaataagattctgcgctcccgttgcaccccctcaagttcacattatcaacctctatgtggcggcagttaatggtgacgatataatgaccattttctgtgttagggtaagcgcctactatgcgaacattttttaatgttaaatctgtggttggcaccgcagcaggcccaccgttgaaaacaaacccttttgcaccatttgcaagtgcgtgtatcgtaatgccgtcaaactcgatgtcggcaagattagtcgtggtattggctgagtttgccaaaaaataaacagcctcagcagagcaacctgatatcaagaagttagaaaaacgcatccttgtgttttctaccggatagaagcggcataacaaaccctgcgagcagttacgaataacaacgttatcataggatacgtcactagctccttcaattgcgacacctgcattcgaactttctacatatagtccagtaactactccattacggaaattcccacgaagcccgtggctttcacagtttttgattgtggcggcgtttatgttaactcttgtaatagctgtcccttccccgcttccgttcacaaggtcgtctgattgaacacgcaaaccgttaccgccagaggtattaatgctcacatcgtgaatcataagattaagagtacggtttggccggtgtgatgagaagaacaaagatgaggcccaagtgtttctgcaacggatatgatggacgtgcgcctctgtagggtcattgacaatgatcgccatgccagtgcggttgctgccatctggatcttgaattttcccacgaccacaatcatgtgagtacagattatcggcaagaacccatctcccataatccatcgttacgttgctattccatgccccctgcaattcacaccctgaaagctcaagtgtacctgcagattgcatggccaaaccaacccctgggtcaaatgaagcattctgccgataaaaatcaaacaagaaattaccgacaatgcgtatatcatatggagtatagtcaaactcttgatttgattcgttccatgtccgtggggatctgagccataattgtctggaatctaccgtcacttttggcaataacggctttatgaggatgtctccctgaatattaaatataccttctacagttacgggagagtaagcgatcccgatatttccagatagtggaagtagtctactaagttgagcgtcattttgtgcaattttccaaccagaattaacctcattaaaaaatgatattgggtaaagttcaatattatcattaattacagttgagtcataactggtaattgtcaatggtgatgataatggtgtgctcatcatcataagggcgccatcaagcctaacgaatcttacaccttcgggaattaagtctcctatttttgcatcaattccaattttattaggataaacctcaccacctaaaaatccattcattcctcgaagccaagatagatttaacatgactgataactgatctggatcgtacttcagcacattagggaaatagaactgctgtgatccatatgcatcgtacacagccatagaatgcccttgtacagtaacgaacttagcaatctgtccgttatatacagggtagccagcagcgttaataattattggttgcgaaacgggaatgtgagagccgtcttcgttctccacataaacctgaatttggttttcaggatttaccgggtccgtgtcaattttaccgatataaattttgccattggctacggctttaaaagaacgagccatagtgaagagttgcgaaggcatactcactacaacattggcatttattgaatctgtcatttaatttgctccagatgcaaggaatcgccgcagcatggctacggttaattttgggcataaaaaaacccagccgaagctgggtcgttgcgttggttatctgtcagtagttatgcactggctgaaggatttgtacaaaaaaccacctgacggtgggttaatttttgcatttacctgggccatattgactacttataaaatgagatcaatatttaatcgcccaataacgggtgtatgttgaggtatatcatggcgaaaaaaccaggtgaaaacacaggaaaaaacggcggaatataccaagaagttggcccacgcggcggtaagaaagacaattttgccaccgtcaaggacaacgaaaggcttccaccaacaacaaagccaggtcatggctgggtattggataagcgaactccagacagcaaaaagtaataatcaagccggttcactccggctttttgatatgtcgctcgcagaactcaacaagcctgctcattaagtagcagtaagtctcgttggctcttcctggttcaacatcaacacctacccttgagcagatatcgaatgccatgtgagcgcactcatgggcaatagtagatagtttgccattgaacacgcctatcacatgcaaaacaccattctcgctactcattgtatgagacgctccgttggcgtccgagtcatgcacgtcaacgccaagtttttgatgcaggcgttgccattctggaaagtctctacaaaacacaattgtaccgctctcaaagagcggaacgagcatctttggtacgtttccaatgttaacttttttcatggtatcctgcgcaaaactaaggagagttaattatatgaaaaaatcactgttaattatcccgcttctgctggctgggtgcgcaaaagtaagcgactatcaggcaagttgcgagcaacgctatccaaagcttagcgatatggctaattgccttgatgccagcttgaagaacgactctcgcatggcatcagcaccaacacctaagctttatgtccttgctgcgaagatgctcgggcaaggtgtcgatgaaggcaagataagtgacacacaggcaagacttgaacttcagaatctttatgttcaattacaaagccaagaacaagcacaacaaatagcacaaagccaagcattccagcaggctttattgaattatcaggctgtaaacacaatgcaagcgatcgagcaaaaagcgcgccagcctgttataactcaaccttacccaacacgcgttgacacatatacaaactgcaattcaggatttggaaacacggtaacatgcaacagtagcagtaatataagatagttatatcttatttttattgctgttctgctgtaatttggcttgaaagtatagggcgtatcgcatttgcagcattatttagcgctctttcataggctggtgttcctgctttggtgtttgccaaacgtaagagagcattccttgctgcttttgactcatacaagcgcatcattgcaccgaaaccagcctcaagccccattgatacgccaagagtcgcagttgcgccaatcgtccttatcctgttggcttgcgattgccccgtctgagttactacatttgcggtgtctgaccttgctgtttgctgtagaacttcatgaagagaatcaagctctttcatgtgctttccagaaaaaatagtgttgtaaatttcaccgcctgactgagatttcagcttattaacttcagtgatgaacttggctggagagtcaccggccttttccgctattttgctgacgtaagctgcacgcatagcatctttccctttatcatccaatgcgctccagattcgtttcacgtcagatggttttctgcttaatacaacggtatttataagttcaggactggcttcactgcttgccttgttgagcttgttagcaatgtttttattaagcaccttattataaacgtttgcataatcggaatttgctttaaggtattttgctgcgtctgatgcaccgaggtttttagcaactgcgttacgaaggtcttttgacattgcattctctaccatattggtagctgcttttgcctggttggggaagaccatagcatctccctgaacattagatctaaatgctgttctgtgctgacgcaagagatcaaacgtaacatccaaatcagttgcagggttagctaattcttcacgtaggttacgcaaggatgtaagcaggctttgattggctgaagtcccaagccgttcctgtcttgcgatcgctgcattcagagcattcatggtatttgtggtatcaactgcggcattacccattttattggtgacgtcattgataacagcgccagcagcatccttccgcccccttaacgtggtggtcagagatttcaccacatcatcagggttgtactcaccaaaacggtcaaaataattgcttaccagcttactacgcgttgcatattgctccgctcgctttaagcctgtcccgagcaaagccccctcggcatcctgagtaaggccgcgagtgaaagcatttttcggcgggataacatcagatgtcattggtgtcacgcccatcgattctgatgtggcaattttcttcgccacttctggcgcaatatcaccttttatagccgttattccacgccctattccctttgctgctgcggaaagaaccccctgagcggcaaggttaactccggcatttttggctgcattttgtgcgaaatcgcctttctgatttgcggcctctgccagtgatccaatagccatgcttcctgccgttccaacgcctggaactaaatacccgccaattgtttcaccggcttgcgcgtaagggtcggtcggtcgatctactggacgatagacatcgtccaaaaccttggggccaccaagcccctggctgattgcattaatcagacttgcgccaccctgcaatacgtcaaatggtatgtttaccagaccacgaccagcctgctctgcaatttgccctgcactttgcccgcctgtgagccaatcgccagcttgttgcatcaatgatggttcttcacgtgctggttcattattggcctgattaactgtttgttgctgaacagcctgaccagcaaaatactcatcaatggcggtgccaatatcttccgtgctcgtaccatcagggaaggtaaatgtcttaccgtttgcagttactttcatcattccaccgtaaattgaattcctgattttgaggtatatgatccggattgactctgctactgttgggtatttgccggttgttggctattgctctgttgttgactatttgcagcacttgaaaccaccaaagcatcataaacgcgaccagactgaccacgtaatgagttatattggccctgcatttttcgcatttttgtttcagtagcagccttggaatcaccgggctgaggcaggtacattttggaatactcctgcatctctggcagagtaattgctgcacctgtttctgggcgcaaaattgcatacaaggcgtctctcgcatttaccatatattgctgctccgctggtgataggcttaaatttgcaatagtcccatcaccaagagagcgatttattaatgcaactcgcttagggtcaatgcttttactaagctgattcattgagtccattgaatcttttaatcgcaaagcaaatcctgccgccttcttggaaccctcattagccttatctatgatgctttgcgcttgtggcaagctaattggtttaatgccatcaccagatataggttggtttagttttccggcttcctcgctgccatcggtgtaatacttagttaccgagccatcaggattggtttcaaccttaagtaatttcttagcattgggattaattcccgccgctgccgcaaatgccgctgcaccatttggatccgcctttaacatttgcgcgtactgattgtaattctgcattgcagctgttggtgcatatgctgacgttaacgcatttgctcggctaatatcctgccctctcgcctgaagcgcctcgccagcctgattgctgcgaatcgtctctgccaactcgccacgctcaatatcccgaccagccatcttgtcctgaacattgaagtaatcaatcggaccaagagcagccattccaaggtgatcaacaaactcaccaaatcctgaagggttctgctgatacatctgagcaacgctgttagggtcaacaccgacgcgagtcagttccttggcgttgttttgcagccatgattgcattgcttctggagacgatgacgcaaggcgtgcgccagccgctaaggtgccgatagaattacgctggtcttcatcaatgaatcccatgcctttacgaacggattcaatctggtctggatattgagtagccaactgacgcaaagcaccgcgatcaccagacgcataagcattagcgtacgcctgctgaaattctttctgccgctgagcctgcttttcctgctgaaccccccccgcaatacctgaaaggccttgcaaagcagtcagcccaacattgttagcgcctgaacgctcaatatcattgttctgcctgataagctgaagcgtattgccgatgtcatttacgctcggagcgtttgagttgacgccgccgataccagccaacaatccgccgtttgttccttgccaagtagccatgattaccccttaaaacaacgagccaagcaatccgataccagcaccaatgccagcgccccaaggcgttgatgttcccaaaaggctggcaagacctgcaccggcaatcgcaccagacgtgccgccgctaattgcagtctgaagacttgatggtttattggcatttgcagcggcaagagctgcgctttgctgtgcaatgctgctcatgttgttggcgtacgtctgcccggcgtttgcctgaccttgcagagcaccaagcccaacgtttgccagattgttgtaattgctcatctggtttgataacaatcctcgcactcgcggggatttcttttatctgaactcgctacggcgggttttgttttatggagatgataaatgcacttccgagtcacaggtgaatggaatggagagccatttgacagggttatcgaagcagaggacatcaacgactgctataaccactggatgatatgggcgcagatagcacatgcagacgtaaccaatattcgaattgaagaactgaaagaacaccaagccgcctgatggcggttttttattacctgatttgcaggttcgattccctattcggagatagcactcatgcaacacgaactacaacctgattcactggttgatttgaaattcatcatggctgatactggcttcggtaaaaccttcatctatgaccggattaagtccggcgacctgccaaaagccaaagttatccacggtcgagcaagatggttatatcgtgaccattgtgaattcaaaaataagctcttaagccgcgccaatgggtaaaatagcgggtaaaatatttttcacatctaaaaaacaccattccaatcaatcccctgctgcttcaagtagatgtctgcaggggacaccatccttgtgtttatccctaaaaccacataaaaaccgtaaattaaattcgaactagcaggccgaataaggcacaccaggaactcgtggttttattcattatgaagtggtttttacctgttctcttagccaggtaataaacgcttcaatttttggccactgcctgcccggtaatgtggtgatgtaataatgctgatggcatttcaccgtcatatcgccaaacggcgcgacgagctcaccactggcaagccttttttgtaccaggcgttttcttcccatcgccaccccaatatgattcatcgcggcaataacagctaaatcagaacgatcaaagccaattccagaagatgtcggcaaattaaccgcataatgttgcgcccaactatgccattcatccgtaccggagtcgttgctccatgcctgtctgtcatggagcaacgtacagtgacacaggttaattaccgtgttggttaaagcatgtctttgagcgtattccgggctacatactggcaggatttcttcatccatcagaaagtgatgagtgagttgcgctgacggcgcatcatcaaagtagatcgccaaatcgattccggcacgttgcagattgacgttgtcattaccagtgagcacggtgagcgaaatagacggataccggcgtgtaaagtcacctaatgcgggcaccaaccagcattgggcgatagagggccgggaatacagagttaacgttcccgataactcctgatttttgatatcaagaatttcctggttcagggtatccagcgacgattttagcgcccaataaacacgtttcccctcgtgcgttaattccactttgcgatgggaacgaacaaacaactgaatgcccaattcttcttccagctgattgatacggtgacttaccgcactggggctcagcgacaattcctctgccgccagggcgaaggactgatgcctggcagccacttcaaaagtatgcatttttgataattgccagccgttaagcagccgatttcttatttcacgaaggggttccataatcacctcatttttcgcttaagtgtaaaaaaatagcggcaaaatttcagctatgagatgagctaaagtgaaccatatctcaattcaccttcatttttagatgtaaatcactccattgatgcaatttacctcatgtgaaaggcaaattttatcgtttgtcagcctgcgttgtttttttgtccaatatcatcaggttaatcacaggggaaggtgagatatgcactctcaaatctgggttgtgagcacgctgcttatcagcagcgtgttaattgtactgaccatcgtgaagttcaaattccacccgtttctggcgctgttgctggccagcttcttcgtgggaacgatgatgggcatggggccactggatatggtaaatgctattgaaagtggaattggcggaacgctggggttcctcgcagcggttatcggccttggcacgatactgggaaaaatgatggaagtatccggggccgcagaaagaattggtctgacacttcaacgctgccgctggctttcagttgatgtcattatggtgctggttggcctgatttgtggcatcacgctgtttgttgaagtgggcgtcgtgctattgattcctctggctttttcaattgccaaaaaaaccaatacctcattattaaagcttgccattccgctatgtaccgcattgatggcagtgcactgcgtggttcctccacatccggctgctttatatgttgccaataagctgggcgcagatatcggttcggtgatcgtctacggtttgctggttgggctgatggcatcactgatcggtggcccacttttccttaaatttctgggtcaacgactgccctttaaacctgtacccacagagtttgcagatctcaaagttcgcgatgaaaaaacactaccgtcattaggcgcaacgttattcaccatactgctacccattgcgctgatgttggttaaaacgattgccgaattgaatatggcgcgtgagagtggtttgtatatcttggttgagtttattggcaaccctatcactgccatgtttatcgccgtgtttgtcgcctattatgtgttgggtatacgccagcatatgagcatggggacgatgctcacacatacggaaaatggcttcggttctattgctaatattttgctgattatcggggccggaggcgcattcaacgccattttaaaaagcagcagtctcgctgatacgctggcagttattctctccaatatgcatatgcacccgattcttctggcctggttagtggctcttattctgcatgcggcagtgggctccgctaccgtggcaatgatgggggcaacggcaattgttgcacccatgctgccgctttatcccgacatcagcccggaaattattgcgattgctatcggttcaggtgcaattggctgcacgatcgttacggactcgcttttctggctagtgaagcaatattgcggcgctacgctcaatgaaacatttaaatactatacgacagcgacatttatcgcttcagtcgtcgctctggcgggcacattcctgctgtcatttatcatctaagcgcaaagagacgtactatggaaaacgctaaaatgaactcgctcatcgcccagtatccgttggtaaaggatctggttgctcttaaagaaaccacctggtttaatcctggcacgacctcattggctgaaggtttaccttatgttggcctgaccgaacaggatgttcaggacgcccatgcgcgcttatcccgttttgcaccctatctggcaaaagcatttcctgaaactgctgccactggggggattattgaatcagaactggttgccattccagctatgcaaaaacggctggaaaaagaatatcagcaaccgatcagcgggcaactgttactgaaaaaagatagccatttgcccatttccggctccataaaagcacgcggcgggatttatgaagtcctggcacacgcagaaaaactggctctggaagcggggttgctgacgcttgatgatgactacagcaaactgctttctccggagtttaaacagttctttagccaatacagcattgctgtgggctcaaccggaaatctggggttatcaatcggcattatgagcgcccgcattggctttaaggtgacagttcatatgtctgctgatgcccgggcatggaaaaaagcgaaactgcgcagccatggcgttacggtcgtggaatatgagcaagattatggtgttgccgtcgaggaaggacgtaaagcagcgcagtctgacccgaactgtttctttattgatgacgaaaattcccgcacgttgttccttgggtattccgtcgctggccagcgtcttaaagcgcaatttgcccagcaaggccgtatcgtcgatgctgataaccctctgtttgtctatctgccgtgtggtgttggcggtggtcctggtggcgtcgcattcgggcttaaactggcgtttggcgatcatgttcactgcttttttgccgaaccaacgcactccccttgtatgttgttaggcgtccatacaggattacacgatcagatttctgttcaggatattggtatcgacaaccttaccgcagcggatggccttgcagttggtcgcgcatcaggctttgtcgggcgggcaatggagcgtctgctggatggcttctatacccttagcgatcaaaccatgtatgacatgcttggctggctggctcaggaagaaggtattcgtcttgaaccttcagcactggcgggtatggccggacctcagcgcgtgtgtgcatcagtaagttaccaacagatgcacggtttcagcgcagaacaattgcgtaatgccactcatctggtgtgggcgacgggaggtggaatggtgccggaagaagagatgaatcaatatctggcaaaaggccgttaataacgtttcaacgcagcatcgcaatcctttccctgggtgagcgatgctgccgatggcgcagacttaagatccccggtcttacccgctataaccccctccttttatcatcacccaacgcctttcgctgtaaacggcggtttcgcaaaccaaaccaaaaccgtaagtaagataaaagcaatagccgccatacggaaaatctcatttgcagaaatagaaagtgactgctgggttatttcattattaatttcattaagaactcctgaaagcgaaccatagtatttatccataatttgtgacgatgaattaaacacggggttaaattgatcgatggttgctgtcaactgactatggtgtaacgattcgcgtcgtccccacagcgtcattgtcaacgacgtaccaactgatcctgacaaggtacgaaaaaaattactcatactcgaggcattggcaaatttattatctggcaagcctgaaaacgaaatcgttgttaagggtaaaaagaaacaggcaacggcgaatccctgaaaaaactgcggcataatgatacctgtaaaatcaatcgttggcataaatgtcacagaacgccagtaatagcaaaccgcatacatcaaaaaactgaatgtcaccaacacccgcatgtctattttgttgccataacgtcctatcaaaggtgaaattaatagtggcatgatgccgatgggcgcataagcaagtccggcccatatcgcattataccccatcgtttcctggagtaactgcggcataaggacgatcgctccagagtaaaataaatacgcgcatgtgatactcacaataccaatggtgaagttacgggacttaaacaaactgagatcaagaatcgggttctctgaggtcgactcccaaatgactaaagagatcagagaaataactgatactactgttaatattattatcgtactcgagttgaaccaatccagatcgcgccctttatcaagcataatttgcaagccaccaacaccgagcactaacagggtcagtcctggtagattcattttgaccggtgaagtctcagtttctcttcctttaagtaaggttaagcataatgtcaggacgacaatccccatagggacattgattaaaaatatccaaccccagctaaagttatcacaaatatagccgcccaatatcggcccacatatcggagcgataatcacggtcattgaccataatgccagagcaaatgtccttttttctggtgggtaattccttaataataaactctgtgacagtggaattaacggccccgccattaacccctgaacgactctaaaaaatatcagcacatcaagattggtcgataggctacacattaatgaagacagcgaaaaaaaggttactgaaagtaaaaataatcttaattcgcctattctttgtgccaacctgccagtaacagggatcgcaatggcatttgctacaccaaacgaggtgataacccaggtgccttcgtctgttgatgctcccagaaagccagatattgtcggtattgcgacgttagaaatagtggaatccaacatttgcataaatgtcgctaatgacaatgcaatagtgacgcaccataacgtcccaccggttaatggtgccggagttgatttagtgattgccattaaagttgtccattatgcgaaataatgttgctaatttctttttctatcggactggtatcgataactaaagccttactggtataagccggcatggaggtcacggttgaagccagctcaggcatctcggcaatgtcttcgttcttcgtatcaatagttgctgtcatcgataaaccaatacgcaagggatgttccatgagttcttttggatcaagagaaacttcaaccggtacacgctgaacgattttgatccagttccctgtcgcattttgtgcaggtaataaggagaacgcattgccggttcccatattgatccctgtcacccgaccatgaaacacaacattttcaccataaagatcgctgataatattgaccgattgaccaatccgtacatccgtgagttgtgtttctttaaagttggcattaacccacatttgacgtgccggtacgacagccattaacgattgtccggggctcactgtttcgccgacctgaacacttctctgggcaatatagccggtaaccggactcttaatatccgtacgtttaagcgccaaccaggcttctttagttgcatccgccgcttcaacgacttgtggctgacggtttaatggtgtgttcattactaaagctttattcgctttataagcctggatagcggcattcaatgccgctttgctacttattaacgtatctttggtatgctccagcgtttcttttgaaataaccccctgcttcgctaacggcactcgacggttataatcttctaaagattgttgatactgaatacgtgctgaagcgacttcggcactgtattgtttatcctgtaagtatagtttattcgtttgccgaacaatatttgccagattatttttagctttattgagtgcgatagtggcatcagttttatccagtgaaactaaaatgtcaccttgtcgaacgtagttcgtatctttatgattaacgacagtgacactacctgagacttgtgcagaaattggatctgcattccccgtgacataggcgtcatctgtactaatcatgtcttctaattccattgaccaataggcataggcacctgaaaacgcaataaataaaactaccgccaataaagaaaagtattttcttctgttagaatgttttttatttgaattaatctgttccactattatctctcatttctcatagatgaaatttatgaattgaatgaaaagagcattcattcttcatatcaaacacagtgcatgtgttgcacattatcccaggaacgttggaggcctaatttaaatgaggtgcaaaaaaaacaacagaggactaaaccgtggcttttgcaatacaattcttacgcctgtaggattagtaagaagacttatagtgccaacttgaaactataaatcatcggtacaatccctgattttattgttgacatttcatttatgccgactatttatatggtatacttgtcgaattatcttaaaggaagctcagattttcttatttttattgagaaaatgagatgacgccttatgtctgtattactacagggagaagggagatgcttcattgcaaagggaataatctatgaacgcaataattattgatgaccatcctcttgctatcgcagcaattcgtaatttattgatcaaaaacgatattgaaatcttagcagagttgactgaaggcggaagtgccgttcagcgggtggaaacacttaagcctgatatcgtcatcattgatgtcgatatccccggagttaacggtatccaggtgttagaaacgctgaggaagcgccaatatagcggaattattattatcgtctccgctaaaaatgaccatttttacgggaaacattgtgctgatgctggcgctaatggtttcgtgagtaaaaaagaaggcatgaacaatatcattgcggctattgaagctgcaaaaaatggctactgctatttccccttctctctcaaccggtttgttggaagtttaacgtccgaccagcaaaaactcgactccttatcgaaacaagaaattagtgtcatgcggtatattcttgatggcaaggataataatgacattgctgaaaaaatgttcatcagcaacaaaactgtcagcacttataaaagtcgcctgatggaaaaattagaatgtaaatcactgatggatctttacacattcgcacaacgtaacaaaatcggctaaccacatgaagtttttaccctatatttttcttctctgttgtgctctttggtcgaccatgagtttcgcagacgaagattacatcgaatatcgtggcatcagtagtaacaaccgtgtcacacttgatccactacgtctgagcaacaaggaattacgttggttagcgagcaaaaaaaatcttgtgattgcagtacacaagtcccaaacggctaccttgttgcataccgattcgcagcaacgggttcgtggtattaatgctgattatttaaatcttttaaaaagagcgttaaatatcaaattaacactccgggaatacgccgatcatcaaaaagcaatggacgcgctggaagaaggtgaagtcgatatagtgttatcacatttagttgcttcgccgcctcttaatgatgacattgctgcaaccaaaccattgataattacctttccggcgctggtaaccacccttcacgactcaatgcgaccgcttacctcaccaaaaccagtaaatattgctcgggtagcaaattaccccccagacgaggtaattcatcaatcatttccaaaagcaacaattatctcttttacaaatttatatcaggcattagcatccgtctcagctgggcacaatgattactttattggtagtaacatcattaccagcagtatgatttcccgctatttcactcactccttaaatgtagtgaaatattataactcgccgcgtcaatataattttttcttgaccagaaaagaatctgtcattcttaatgaagtactcaatagatttgttgatgctttaacaaatgaagttcgctatgaagtatcacaaaattggcttgatacaggaaacctggcctttctgaacaaaccattagaactcactgaacatgaaaaacagtggattaagcagcatcccaatttaaaggtgctggaaaatccttactcgcccccctattctatgacggatgaaaatggctcggttcggggcgttatgggggacattcttaatattattaccttgcaaacaggtttaaatttttctccgatcaccgtttcacacaatatccatgctggaacacagcttagccccggaggatgggatataatacctggcgctatttatagtgaagatcgagaaaataatgttttatttgctgaagccttcataacaacgccttacgtttttgtcatgcaaaaagcgcctgacagtgaacaaacattaaaaaaaggaatgaaagttgccattccatattattatgagctgcattcgcaattaaaagagatgtatccggaggttgaatggatacaggtcgataatgccagcgctgcatttcacaaggttaaggaaggtgaacttgatgctctggtcgcgacacagttaaattcgcgttacatgatcgatcattactatcctaatgaactttatcattttcttattcctggcgttccgaatgcatcgctttcgttcgcttttcctcgcggagaaccggaacttaaggatattattaataaagcactgaatgcaattcccccaagcgaagttctgcgcctgacggaaaaatggattaaaatgcccaatgtgaccattgacacatgggacctatatagcgagcaattttatattgttacgacattatccgttttattagttggcagtagccttttatggggattctacctgttacgctcagttcgtcgtcgtaaagtcattcagggtgatttagaaaaccaaatatcattccgaaaagcactctcggattccttaccgaatccaacttatgttgtaaactggcaaggtaatgtcattagtcataatagtgcttttgaacattatttcactgcggattactacaaaaatgcaatgttaccattagaaaacagtgactcaccctttaaagatgttttttctaatgcgcatgaagtcacagcagaaacgaaagaaaatcgaacaatatacacacaggtatttgaaattgataatggcatcgagaaaagatgcattaatcactggcatacattatgcaatcttcctgcaagtgacaatgcagtatatatttgtggttggcaagatattactgaaacgcgtgatctaattaatgcactcgaggtagaaaaaaataaagcgataaaggctaccgtagcaaaaagtcagtttctggcaacgatgagtcacgaaataagaacaccaataagctctattatgggcttcctggaacttctgtcgggttctggtcttagcaaggagcaacgggtggaggcgatttcacttgcctacgccaccggacaatcactcctcggcttaattggtgaaatccttgatgtcgacaaaattgaatcgggtaactatcaacttcaaccacaatgggtcgatatccctactttagtccagaacacttgtcactctttcggtgcgattgctgcaagcaaatcgatcgcattaagttgcagcagtacgtttcctgaacattacctggttaagatcgaccctcaggcgtttaagcaggtcttatcaaatttactgagtaatgctctcaaatttaccaccgagggggcagtaaaaattacgacctccctgggtcacattgatgacaaccacgctgttatcaaaatgacgattatggattctggaagtggattatcgcaggaagaacaacaacaactgtttaaacgctacagccaaacaagtgcaggtcgtcagcaaacaggttctggtttaggcttaatgatctgcaaagaattaattaaaaatatgcagggcgatttgtcattagaaagtcatccaggcataggaacaacatttacgatcacaatcccggtagaaattagccagcaagtggcgactgtcgaggcaaaagcagaacaacccatcacactacctgaaaagttgagcatattaatcgcggatgatcatccgaccaacaggctattactcaaacgccagctaaatctattaggatatgatgttgatgaagccactgatggtgtgcaagcgctacacaaagtcagtatgcaacattatgatctgcttattactgacgttaatatgccgaatatggatggttttgagttgactcgcaaactccgtgagcaaaattcttccttacccatctgggggcttacagccaacgcacaggctaacgaacgtgaaaaagggttaagttgcggcatgaacttatgtttgttcaaaccgttgaccctggatgtactgaaaacacatttaagtcagttacaccaagttgcgcatattgcacctcagtatcgccaccttgatatcgaagccctgaaaaataatacggcgaacgatctacaactgatgcaggagattctcatgactttccagcatgaaacgcataaagatctacccgctgcgtttcaagcactagaagctggcgataacagaactttccatcagtgtattcatcgcatccacggtgcggctaacatcctgaatttgcaaaagttgattaatattagccatcagttagaaataacacctgtttcagatgacagtaagcctgaaattcttcagttgctgaactctgtaaaagaacacattgcagagctggaccaggagattgctgttttctgtcagaaaaatgactaaatagcggctcccacaatgttcaaatgtgggagctatttaccagcacatcttacatttatgatgagaactcctggcgaatttgttccccatgctggtcgagcgttgccgctcccggcataacatgcgggtccgcgcagccgctgatttttatcggattacccggcatcattattcccccggcttcaatcaacatatttctcgcctgagtttgtggcaatttaatggcctcagccacacttaataacggcgcgacgggtacaccaacttcatgtattctggctaaccaaacttcagctgcctgcgtttttaacgtccgctcaatatattgtttaagaatagcctggttttgtacgcgtaaaatattgctgctaaatcggggatcattaaccagttccgtaagctccagtgcctggcataacgcagaaaaaagcttgtcattaccacaacaaatcgtaatcggcttatcctgagtattgaaaacatcaaaaggtgccatgtagggatggcgatttcccagacgttgtggtgacttcccagttgcgatatatgccatcagaccatgctccagaaaactcagcgtggcatcaaacatcgctatatcgacatgcgcccctctctggctcttttcgcggccataaagtgcactcactattccgctgaataaatagacaccgccgcatagatccgcaagagatgtaccaacgcgcactggcggagcatcaggatatcctgtttccatcattatcccgctcattgcctgaatgatggtatcgtaggcaggagcatcttttagcggaccggtatgtccgaaacctgacgatgaagcatatatgaggcgcgggttgatttcttgaagcgtttcccatgaaaaccccagtttttccattgtacctgggcgaaaattctcagctaatacatcagcttgtttgagcatatttataaatatacttttatcgtgatcattctttaaatcaagaaccacactctctttgccatgattaataaaactgtaatagagtgactgtccatccacatagggaccaaatgtgcgggtatcatcaccatgacccggcggctcaactttaattacccttgcgcccatattacaaagaagttgagttccgaaaggtccattaaggacatgtgtcatatcgataactaataagccttcaaacggccctttgctttcattatttgtcatttgcttatgccttgaaaaaagccgaaggtgaaaagacacttcggcatttatgtaaaatcaataacatgattaattatgaaaccagtcgactgacataaatccacaagggagccgtgacgacaaagcccagtacgctcacagccaatgacgctgtaccagtacgggtgtagacattaaaccggctggcaataatgattccggagaatgccggcggtaatgcgcctgccagtaccatcatctgcagatgttcgctgttcaaatgacatgccataccaacgagaagcagtgccagtggcatcagaatcagcttcaggaaggtgttataagcaatttcggcactgaactcgaatttatgtgcagccagagtcaaccccgcagcgaataccgctacccctgagttagccttcgcaatcagattaaaggttgggtcccatgctgccggaatttttaccccaaccaacaccaggatcgttgccagaacaggtgcccatactactggctcctttgccgcagaaattaatgcgctcagattactattcttcttaccatccgctcctgaagaaggattcagcaaatacagaccaataggaatagtaattgcgttaacaataatagaaataattgctaccactaaacctgttgatacggaatcaccataaataggatcgagaactgcaaaccccaggaatccaatggtaggtgaacctgcaattaatgcacatacagctgcttctgcatgggtacgtttaaaaaatttgtagcaaccgaaccaggagaaaaagaaacatccgacaataaccacaagtgatacaagggtcagacgagtgtccgcaaaaatcatttccctgtttgcccgagtaatagatacaaatagagccgcaggaagcgcgtagtttaataccagtttattaaatgcccgagcttgatcttctgaaaatgtttctcgtctgccgctaaaataacccaacagcatgattacgataataggcaataaatcgccaataaaaaatgttagcataatagtatttccgataagggtcccctcaccatcgcataatgagttggcaagaggagacgatgtcagtatttaattaccagcgacttgttttgggttaagtttggtaatatggccactttcagttcctgctgcagggtcgatgaccacattaataatggtcggtttgcgcgactgaataccggtggttaaagcatgacgaagttcatctgtcgtggtgacgttatagccaacgccacgaaacgcatccattaatttgtcataccttgcatggtgcaacagatccgttggtgatggtgcaccagcgccactgagatcaacaccgtctcctctgtagatgccgccattattaaaaataacgatcgtcaccggcaggttatatcgacaaatcgtttcaatttccatcccactgaaaccaaaagcactatcaccttcaatggcgacaaccggagaaccagaagtcacgctagcaccgatggcatagcccataccgatgcccatgacaccccaggtaccacaatccagacgacgacgtggtttatacatatcaataatatttcgtgcattatccagggtatttgcaccttcattaactaaataaatatcctggttctcgcgcaatacgtcgcgcacagcacttaatgcattaaagtaatttaatggttgagtatctgtacttaatttttcatgcattttttgtgcattttgctgcttgtggatatttaaaatatcgcgccataccagtggagtcgtaaatgtgttttgtttcagttctgccagcataccttgcatactggatgcaatatcaccaacgactggcacagcaatggggcggttgctgtcaatttcctgcggttcaatatccagttgaataaactgtgtatctgccgcccatccttttttaccgtgtgccaataaccaattcagtcgtgcaccaacaagcatgacaacgtcagcatttgccagggcaaacgaacgcgcagctgccgcagaaagtggatgcgtatcttcaaggatccctttcgccatagacattggcaggaatggaatctgagcactttcaataaattcacgaagctgttcatcagcttgtgaatacgccgcgcctttgccaaggataattaatggccgttcagcttttgctaaaagcgaaattgcgctagtgactgacttcgggcatggcaataatgctggcgacggattttcaactttaacaatcgtggttaacgcttcgtctttttccatcgtcgcggccaggacatttgctggcaaatcaagataaactccgccagggcgacccgatacagagacccggatagcgcgtgccaatgcaatgccaagatcctgcggctgattaacgcgaaatgctgctttggcatacggttttgccgcattcatttggtccagctcttcataatcaccttgctgtaggtcgacgatcgcgcggtcgctggagccgctaatcatgatcatcggaaaaccatttaccgttgcgttggccaatgcggtcaaaccattgaggaatcctggcgcagaaactgtcaggcagatccccggtttttgggtaagaaaaccgcttgccgcagcggcatagcctgccgactgctcatgacgaaaaccaatataacgaatgccttccgcctgggcatggcgtgccatatccgtcacaggaatacctacaacaccataaatagtgtcaatattattctgttttaatgcttcaacgatgatatgcataccatctgtcatttgaagttgatctgacatgattaataacctcgaaatttttataaattgggagccagaagcccccgttaatatcagatggcgtggttttgcttcattgcagcaatttcatcgtcgctataacccagctcctgcaatacagcagcggtatgttcacctaatagcggcgcagctttaatatccggcgtaaaggcagagaatttcattggacaaccaacggtcagatattttccacgcaacggttgttccacttcaacaacactgccactttggcgcaaagagggatcaagtgaaatttctttcatacttaaaaccggtgcacaaggaatatcaaactgagtcaaataggccaccgcttcatgtttatcaatagtgacagtgtatttttcgatttcagcaaaaatatcgaaaatatgtggctgtcgtgcatgggctgtactgtatgccggatcggtaatccattctggtttgccgatggctttacaggtgttttcccagttttgctcctgaatagtgaaataaatataggcgttaggatcggtttcccagcctttacatttcaggatccagccaggctgaccgccaccacctgcattaccaccgcggggaactgcatcaccaaatgtaccattcggatactgcgggtattcttccagataacccaatttatcgagacgctgctggtcacgtaatttcacgcggcaaaggttcaatacggcatcctgcattgacatggtgactcgttgcccacgccccgttttttcgcgatgcagcaaagcagcaagtaaaccgatcagcaaatgcattccggtgttgctgtcacccaacgctgcagcgcttaccagcggcggaccatcccaaaaacccgtagtggatgccgcgccacccgctgcctgagcaacgttttcataggcttttacattcacataaggcgaacactcatcaaaccctttgatcgaaccaaaaatcagacgtggattgatttcttgaatatgctcccaggtgaagcccatgtgatcaatggcccctggatgaaagttctcgactaagatatcagcttcgcggatcagcttttccattacctctttgccttccgctgttttggtatttaactcaatagaacgtttgttactgttaagcatggtgaagtaaagcgcatcgatatcaggaatatctcgcagctggtgacgcgttacgtcaccaacgccgggacgttcaattttaataacgtcagcgccaaaccaggccagcatttgagtacaagatgggccagattgcacaccggtgaaatcgagaactttaattccttgaagtggagttgacatagcaatacctattagttaattaaatatgtgttaatttagcgtttatttaagtcgtaatatcttctataaataacccgcaaaatatcgtcgtagctgcactcgatatttttaaaatcctgtatcaagtgctgaaaatcatttcatcgccacttccaattcctttctgcatggtaagtagtgaggacgaaaagaagaatatgataaatattgattcgtggtaatcagagagagtcgcgacatttgtgatgttattcttacaactgtaagaagcgccggtgatttacaagcaagggtatgattacgctttttaaagcgtaccataaaacataacataataaatgatttgtgatgacacgggattattgcggtttactttgaggaatataaaatgcgagtttatagcaccgcgagcgccaaataattttatgaccacaacctgtcgtattgtggtcataaaaaattgtcggctggagggagttaaatcctttacctcaatatactgcctgtcagcattagttcacaaacagtgcttcgctatcgacgatgattccatcttccgcacctttaagcgccaggtttgcctcgtagtattgctttttatcaagcagtttctgcgcatcagcaagtgcattacgagtctgtttaagtggcatcagatattggttttccattacgccaacaccggccaggcgaagctcttccattgcgccctttttatcccctttcgccattttttcattggcaatttttatcgcggcttctttttcgggagttgctacataactctcagaaattccgacagatgcattaatgacaatatattggtcatcattgagattggtctttttacctggcttagcgaactttgcccattcggtactgtcatctgacagcaaagcggaagcttcattggtcagttcttttgccttttctggatcgccatgaaacagagccaggcgcgctacctgcacgtcacgcatcgcatataaaccttgttcagagatacgctctgctgccgctgccgttttctgggtttgctgaacttgctgagtttgctgttgtgccgctaccggagcattatcagcagcccatacagttgaagatgccagaattgctgtgaccatcgtggccataattaaacgtttcatacttacctcattctttaacagttttagaaaacgccgccatcatattgggtgagcatgaaatgagaaatcagagagcaacggtcattttgaaagggttatcttacagttgtagttattatcgcaagaagtattttagtcttacaattgtaggaatatgcttcctgtcgcagagaactattcttatataccacaaagagatgtcatttattatatcgatgtaaatactgattaattaaatgtaaatacagccataacatcgtaggttctcagtgaaccattttcaggataactttctatgaaagtaaacttaatacttttcagcttatttttattagtctctattatggcatgcaatgtttttgcattttccatttcgggtggtggaagtgagaggagctataaagagactgaaaaaacatcagcgatgacgaccacacactctacaaaacttcagccatcacaggcgattttgtttaagatgagagaagatgcgccaccattaaacctcacagaagaaatgccgcccccttttccgacaaaggcgaattatcttattcatcctgtgcgatagcgtctttcacatggcaggtgaacaatcatgtctgatgctgatgtgaacacctgcccaaatgagccatcctgacccactaccgcctgccataccccaccataaagcgaatcatcaagccacaagccggggcaagaaacataaatatccccgtcactagttcattaccgccagttaaccacatggtgaagtaataaatgagtgcagcgaggatcaccatgccgaagaaagaagagaccgccgataccacgttcagtacctgaccgatgtagccgcttacgcagacaatacacagggcgagaaacatccataaattaatcatagctcaacctcctgccgcgctaaaaaacctgtaacttcagtcactttaatagtaagacaatccttaacctctggcaatttttgctaagcatcaatgaaaacagcatgttaaatgcaagactgttgtgtacggaaaaatatttactttgcacgattaataatcagtagctgaaagcagtcagcgagtgataaagtacagataccgcattcatgctcctcgtggttatgtcctgactagtctttacactctttacaggaaccattgtcgtacatgatggcccaaccaattgagtgtaccgctgtcgacatggaatcttctgcgatacaacaattcgtatctacagaaggtaactatgtttccacaatgcaaattttcccgcgagtttctacatcctcgctactggctcacatggtttgggcttggtgtactctggctttgggtacagcttccttatcctgttctctgctttctcggcacgcgtattggcgcaatggcgcgaccattcctgaaacgtcgtgaatctatcgcccgtaaaaacctggaactttgtttcccgcagcattctgcggaagaacgcgagaagatgattgccgaaaactttcgttcactcggcatggcgctggtagaaaccggcatggcatggttctggcccgacagtcgcgtacgtaaatggtttgatgttgaagggttggataaccttaaacgcgcacaaatgcaaaatcgcggcgtaatggttgtcggcgtccattttatgtcgctggaactgggcggccgcgtgatgggactgtgccaaccaatgatggctacctatcgtccacataataatcagctgatggaatgggtgcagacccgtgggcgcatgcgctctaacaaagcgatgatcggcagaaataatctgcgcggcattgtcggtgcactgaagaaaggtgaagcggtatggtttgctcccgatcaggattatggtcgtaaaggcagctccttcgcgccgttctttgcggtggaaaatgtcgccacaaccaatggcacctatgttctctcccgtctctctggcgcagccatgttgaccgtaacgatggtaagaaaagcggattacagcggatatcgtttgttcatcaccccagagatggaaggctacccgacagatgaaaatcaagccgctgcctatatgaacaagattatcgagaaagagatcatgcgcgcaccggagcagtacctctggatccaccgtcgctttaaaacgcgcccggtgggagaatcgtcgttgtacatttaacaaactgctcttactctttccctcctcaaatcggccataataacctcatggtttttatggcttttttcttaaggttttttccttcgctgaatatctaattattaccgtcagaaattaaactgtcgccgatatgagacgcttgtaagttactaaaagtaaataagaaaatgcctcttgtctcgtttcagttttaggcgtacattagcgccgtctcgagcagtttagctcagaattctggggtgatgcccacggtaaaatacagggcttttaaggtcgctttgcccggtgtcaactcactgtatcaggtgtaatgaagtcattcaggcgtaacagtaattacgcggagagatgtaaagtgaaatatttctttatgggcatttcttttatggtcatcgtttgggccggtacttttgccctgatgatctaaaagcaaactgtgcaatgaaaaacaggagccatcaggctcctgtttgcatttctgacgacggtgtttattccgcgttttcgtgaatatgtttgctgctggcgggtagtaaaccgtcggcacggaacatcgctttaatccctctgatggcctgacgaatacggtcgcggttttcaatcagtgcaaagcgaacatgcgtatcaccatagtcgccaaagccaatccccggcgagacacaaaccttcgcttcgttaaggagcttcttggcaaattccagcgatcccatggccgcatatggttccgggattttcgcccagacatacatcgaagccttcggcatttcaaccatccagcccgcttcatgcagccctttaaccaatacatcacggcggcgtttgtactgttcggcaatgtcgcgcacgcactgttgatcgccctccagcgccgcaatcgccgccacctgcaacggcgtaaaggtgccgtaatcgtgatagcttttaatacgagccagggcgctgaccagcgttttgttgccaaccataaagccgatacgccagcccgccatgttgtagcttttcgacagcgtaaagaactcgactgccacatcgcgtgcacccggtacctgcataattgacggcgctttccagccatcgtagacgatatcggcataggccaggtcatggaccaccagcacatcgtagcgtttcgccagcgccactactttttcgaagaactccagttccacgcattgcgcggttgggtttgacgggaagccgaggatcatcatcttcggtttcggataactttcacgaatggctcgctccagttcgttgaagaaatcgacaccttccaccagcggcactgagcgtacctgcgccccggcaatcaccgcgccataaatatggatcgggtaacttggattcggcaccagcaccgtgtcaccatgatccagcgtcgccagcatcagatgcgccaggccctctttcgaaccaatagtgacgatggcttctgattccgggtcgatttcaacgtcgtagcgatcctgataccagcgggaaatggcgcgacgtaaccgcggaatgccgcgtgaagtggagtaaccatgcgtgtccgggcgctgggccacagtacataatttttcgacgatatgcggcggagtcgcaccgtccgggttacccatgctgaaatcgataatatcttcgccgcgccgacgcgcagccattttcagttcagcggtgatgttaaaaacgtagggcgggagacgatcaatgcgcgtaaagcgacgttcagggcgagtgtcagccataatttcctcagattaacgttagcgcccggaccgtccgagcgacgctgccacgatggtggctgttttgaaaatagcctgattaatttctgtctgtccagcgttttagaacattttattaatgacgttaaatgaggaactctgctttaaaaacaggaaatttatctgcgctaacaagaaaattaccactcattttattaacataataatttcaataaatttactaaccagaagtgcattatcaagagatgcattgctaatacaccatttatctatcaatccccttttaaaattgtggtttttcctcaaaaacggcctgctggtcatcagccttcaggttacctatcatagaggtttaatccttattcagagtcacccgtgcacgaaatattcaacatgctgctggcggtcttcgatcgggcagcgttaatgcttatctgcctgttctttctcatccgtatccgcctgtttcgcgaactgttgcacaagtcggcgcactccccaaaagaattgctcgccgttaccgccattttctcgctgttcgccctgttcagcacctggtccggcgttcccgtagaaggctcgctggtgaacgtacgtattatcgcggtgatgtccggcgggattctgtttggcccgtgggtaggcatcattaccggcgtgattgcgggtattcaccggtatttaattgatatcggcggcgtgacggcgatcccctgctttatcaccagcattctggcgggttgtatatcgggctggatcaacctgaaaatccccaaagcacagcgctggcgcgtcggtattctcggcggcatgttgtgtgagacgttgaccatgattctggtaattgtctgggcaccaactaccgcgttggggatcgatatcgtctctaaaatcggcattccaatgatcctcggtagcgtctgtatcggctttattgtgcttctggtgcaaagcgttgagggcgaaaaagaggccagcgccgcgcggcaggccaagctggcgctggatatcgccaacaaaacgctaccgctgtttcgccatgtcaatagcgagtcattacgcaaggtctgcgaaattatccgcgatgacattcacgccgatgcggtggcgattactaataccgatcatgtgctggcctatgttggcgtgggtgaacataactatcagaatggcgatgacttcattagcccgactacccgtcaggcgatgaattacggaaaaatcatcattaaaaacaatgatgaagcccaccgcacaccagagattcattccatgctggtgatcccattgtgggagaaaggggtcgtgaccggaacgctgaaaatttactactgccacgcgcatcagatcacctcgtcattacaggaaatggcggtcggtctgtcgcaaatcatctccacgcaactggaggtttcacgcgccgagcagctacgtgaaatggcaaataaggcagagcttcgcgccctgcaaagcaaaattaatccccattttctgtttaacgctctgaacgctatttcatcgtcaatccgtctgaatccggataccgctcgccagttgatctttaatctgtcgcgttatctgcgctataacattgaattaaaagacgatgagcaaatcgatatcaaaaaagagctgtatcaaattaaagactatattgccattgagcaggcccgctttggtgacaagctgacggttatctatgatattgatgaagaggtgaattgctgcattcccagcctgctgatccagccgttggtggagaacgccattgtccacggtattcagccttgcaaaggtaaaggcgttgtcaccatcagcgttgcagagtgcggaaatcgggtacgcattgcggtgcgagataccgggcacggcatcgatccaaaggtgattgagcgggtcgaagcgaatgaaatgccgggcaataaaattggcctgctgaatgtccatcatcgcgtgaagttattgtatggcgaggggctgcatatccgccgcctggagccggggacggaaattgcgttttacattcctaaccaacgcaccccagtcgcctcacaggctacgttattgctttgagccggagtgatattgtgaaagtcatcattgttgaagacgaattcctggcacaacaggaactgagctggctaattaaagagcacagccagatggagattgtcggcacctttgacgacggtctggacgtgttgaagtttttgcagcataaccgcgtcgacgccatttttctggatatcaatattccgtcgctggatggcgtgttgctggcgcaaaacatcagccagttcgcccataaaccgtttattgtgttcatcaccgcgtggaaagaacatgcggtagaagcgtttgaactggaggcgtttgactacattctcaaaccgtatcaggagtcacgtattaccgggatgctgcaaaaactggaagcggcctggcaacaacagcagaccagcagtacgcctgccgcgacggtaacgcgtgagaatgacaccattaatctggtgaaagatgagcgaataatcgtcacgccaattaacgatatctattacgccgaagcgcacgagaaaatgacctttgtctttacgcggcgtgaatcctacgtaatgccgatgaacattaccgaattttgcagcaaactgccgccgtcgcattttttccgctgccatcgctcattttgtgtcaatctgaacaaaatacgcgaaatcgaaccgtggtttaataacacctacattctgcgactgaaagatctggattttgaagtgccggtcagccgcagcaaagtgaaagaatttcgccagttaatgcatctttaatcgggaactttcatgaaagcaccaggcttgcccgccgatcaacaatttttcgccgatctgttcagcggcctggtgcttaacccgcaactactggggcgcgtctggtttgccagccagcctgcctcgttgccggtgggcagtttatgtattgattttccccgtctggatatcgtgctgcgcggcgaatacggcaatctgctggaagcaaagcagcaacgtttggtggaaggagaaatgctgtttattccggcgcgcgcggctaatttaccggtcaacaacaaaccggtgatgctgttaagcctggtgttcgctccgacctggcttgggttatcgttttacgatagccgcaccacgtcgttgttgcatcctgctcgccagatccagcttcccagcctgcaacgcggtgaaggtgaagcgatgcttaccgccctcacccatcttagccgttcgccgctggagcaaaatatcattcagccgctggtgttaagtttgctgcatctttgccgtagcgtggtgaatatgccgccgggcaattcgcagccgcgcggcgattttctctatcacagcatttgtaactgggttcaggataattatgcccagccgctcacccgcgagagcgtggcgcagttttttaatatcacgcccaatcatctgtcaaaactgtttgctcagcatggaacgatgcgttttatcgagtatgtgcgttgggtgcgaatggcgaaggcgaggatgattttgcagaaatatcatctgtcaattcatgaagtggcacagcgttgcggttttccggatagcgactatttttgtcgcgttttccggcgtcagtttggtctgacgccgggagagtacagcgcccgttttcagggctaacgtcagaaggttaattctgtttccagcagcgtcaggatactttgtgcatcttgcgcggcaaacaacgactggcggaagtttttattcaccagtttacgcgccagctgcgagaagactttcacatgattcatcccttcgttagcacccagcgtcagcatgatcaccagttcgacttcgcccatttctgactgccagccaatcggtttcgccagccgggcaatgctgatactggaatgacggatccactgagatttggtgtgcgggatcgctacgccaaaaccaacgccggtggtaacaatctcttcccgctgccagacatcttcttccagctcaaacggatgttcagtgcgcccgttaacgccgaggttgccgcacaggaactggatcgcctgctctttattgctaaaatcctgatcaacaaagatattctccagcgccagcagtgggcgaacgtcttcttccggcgtaaaggcggtgagtaacgcttcaatttcctgcgcactgcggcattcacatgcctgacgcgccagttcccgacacgcctcgctatccagttgacgaagctggcttttcaccgccggaatacgcgggctactcatactcagctcatccaggcccagcccaagcagtagcggcagataacggctttcaccgcccagttcaccgcaaatgcctacccatttgccccgctgatgcgcagtggtaactatttgctgcaacatgcgcaggaacgatggcgtaatcgggttatatagcggcgatacgcgcgggttattacgatcgaccgcatacagatactgggtcatatcgttggagccgatactgaagaaatcgacctcatcgcagaagtggtcgatgatgtagcacaccgacggaacttccaccatgatcccaagcgtaatcgtctctgcatgacgcaggccatcgcgcttaagctcaacgatcgctttttggatctcgcctttcacccataagatctgatcgaggctgtgaaccatcgggatcatcaactgggcgttgccgaaactggcggcgcgcaaaatggcccgcagttgagtgcggaacaggccagcaaattccgggtaaatacgtaccgcgcgatagccgaggaacgggttctcttcctggggaatattcagataaggaatgcttttatcgccgccgatgtccatcgtgcggaagataatcggcttgtcgcccgccgccagtagcacctgctggtaggcttcaaattgctcctgctcgtccggcgcgctgtcgcgatccatatagagcatttcggtacggaacagcccgacaccttccgcgccgttggcaaacgcgcctggcgcttccagagcggtgccgatattcgccgcaatatcaatacgcttgttatcacgggaataggccagctgcgcggcagcctgcgcctgttgtttttggcgtttatccgccagcgtctgcgcgacctgataataaccgctcaccgcgtcattcgggttaatcgccagcacgccgcactgggcgtcaagcactgcaggttgcccggcataacgggcaatcgcatccagcggcaagccactcagtaccgggatcgccgaggcacgggccagaatcagtgtatgcgaggtgcgcccggttttctccagaatcatgcccgcaagatttttcaaatcaaggctcaaaaactggcttggggttaaatcttcagccaccagaatggtcggtttttcaagcaccagcttgttgcgcggcttcagttccggccaggtgatatgcagcaactgttcgctgatatcgcgaatgtcgctaacacgttcgcgcagataatcgctggcagaggcagaaagtttggcgcaaacctgctccatattgctgatgatcgccgcccccagcccctgatgctgttctgtcatcaggcgacggatattgcctgcaaattcatcatcctgaatcagcgacaaatgggcgctgaggatagttttgctttcgccgtcacgctcacgcaattgctggttcagttgctcggcaagcgttgccaggctgtgctccagccgggtggaatcttgcgcactggcggggattgcccgataactgtcgaggctgtcgctttgtaacagggtcagcgtacccacgccgacgccgcttgccagcacattgccgtacagtaaatccgggttaaggcggcttaatgaacgcggcagcggatgcgccgtcagttctgcctgcgtaggctgaacgctgtcgctgtcgataaagcgcacctggatgtactcttccagcacgcgccgcgcctgctcttcatcgctgccgctaatgttcaggctgcaactgtcattaaatagggtgccggtgccaatcagcgccagcgagcttttcgcatctgcctttgcgttctggcgatggttaataaaagtgatttcgctttgccactggctgcactgttctttaagttcccacgccggacgagcatgtagaccgttaggcaaaggacagagaaattgaatcgttaacataaccgctccgggttaatcaggagatcatctgaaatccgtcagttgaacaaccgtctcacgcgtaagacgttgaataagggcagataaaagttgctgcatctgcaaaatgtcgcggcaatcggcaatcgatgcggcgcaatgtccatggcgggttgctggccccatcaccactgtgggcacgccggtgccggttaagtgcaccgccccgccgtccgtgccgccgttgctgaacatatctgcctgcaacggcacgccaatttctgccgccacggtttcgacccaggcggtaagttttggcggcgcaatcagcgacttgtcgcttaacaccagcatcggcccgttaccaatctggcgatggttagccgcgccataatcaaagtttttcgcccagcaggcggtatcaagcacaatggcgacgtccggcgacaccgcgcgggtggcagtttgcccgccgcgtaatcccacctcttcgctggaacttgccaccagccacacttccgcaggtagttcggcgtcgtgcagttcgcgcagtaacgtcaccagcagatagcaaccgaggcggtcatcaaaggctttccccatcactcgctggtgagggagaacctgaaaagtggtatcaaacgtgacgcgatcgccgggacgaattcccgcctgcatcacttcgtcataggagcgcgcaccaatgtccacgcgcatggcgctgacgtcattcccctgccggtcgccgtcaagcaggcctggaattttgcactcttcacgggtggtgatgcgcaccggctgcagctggcgggcagccatgcgtacgttgccaaccggcagcacatcaatcgccccttcgcgggagatgctgcgcaccataaatcccacttcgtccatatgcgcacagatcatcaccttcggacctgtcgattcattcaggcggatcagcaccgatcccagaccatcaaatcgcacttctttttgcaggcgatccgcttcttccagcaggatctgccgcacttcctgttccgaggaggcgatcgcatctgcctcgctcaacgcttttaatagcgataaatccattatgcctctcccgtgagcaacactgttttcggcatggcgtagagcacttctgcgccttgcggggtaaccagcacaacatcttcgatgcgcacgcccccttgccctggcaaataaatccccggctccacggtcagtaacatgcctggctgtagcgtcgtggtgtcccgcggtgaaaaacgcggatcttcatgaacttcaatgccgatagcgtgaccggtgttatgaccgaaatagtcgccataacctgcttctgtaatgacccggcgcgcggcatcgtcaacctgctggcagcgcacgccggggcgaatcgcggagattgctgcgagctgtgcctgcaggacaatttgatagacgttaaacagcgggtgagattcggcgctcaccccttcgccattcaccagcaaggtgcgcgtcatatcagagcagtagccctgatacagcgcaccgaaatcgagagtgacaaactcgcccgctgcaacaatcttgtcgctggctttgccgtgcggcagcgccccacgccagccactggcgacaatggtgtcaaaagaggctttttctgcgccctgctggcgcataaaccactccagttcagcggctatctcgcgctcgctcatccccgcctgaataaagcggcgaatatgctctgcaccgcgatcagcaatcccacaggcgaggcggattttctccacctcctctggcgttttgatttgccgcagcacatccggcgtggcgctaaccagtttcgcattgagttcagactgccagcggtgcgcggtttcccaactcacctgctggccctcaaaaccgagcgtttgcaactgttcatcggcaatgatttgattgacgatagtggtaagcgtgttcgtcgcgtcaagcaaatgcagctggtagccttgcgcacgggcttccacctcaacgtaatagcgcgaatccaccagaatgtgcgcactttcacggctaatcaccacataacctgatccggtggagatccccagatgcggctgtttgttctgccgtgaggagagaagcactgcatccagttgttgcgccttaagccagtcgcgcagcgaagcgagtaatgtcatctggattttccttcttacaggctatcgattaacaatttgcctttacggaacatcatcagacgcaggaacaccaccatcagcgcagttatgactgcccccagcgcgatccccgccatatagacgcccaggttagtgaccagcggccatgcccagatagcggactccgggaaccattgcactgcgcccagccagacagcggcggttgagccgacaatagcgccgaccatatacgacggaatggcggtgatggggctttccagcgcaaacggaatcgcaccctcactgatccccataaacgccaggaacatggcggtcttaccctgcggataaagttgagcgttgaacaggcgtttgccggttaaacgacggtcgataatggtcgccagccccagaccaatcggcggaataacgatagcgatagaacgagcggtgaccggtaatacgtggtcagtggtaaagctgaaggcaacaaaacctgcggctttgttgatcgggccaccaaggtcgattgctgtcgccgcggcgatccccattgcgtacatcagcgcgcccttctcacctgcggcagtcagcacagtacggataccgccgttgatccagccaccaaagggggtgatgacgtagtacatcgccagcatgacaaaaatggcggaaagaatcgggagcaaaaatgtggttttgaacgctaacaggaaatccggtaactggattttctggttcatccacttcacaaggtaaccggcaacgatagaaataatcagcgcaccaatgaaggtggacggcaccggcgaagaggtcgcccattgcatagtgctgggatcgaagttcagcagttgcgtcggctgggtagacatcaacccgccgataaaaccagccgggaacgccagtttgccaccgatagagttcgccacaaaagcagcaaacatcggaatggcaaaaccaaacaacacgccgccgaaggactgcgacagccaggcaaatttaagtaaggagaggtcgaaaccggagaatttcccgctattaagagcatccatgatgccgatctcagcaggaattttaagccagctataagcaatcagctggctgaaagcgaggatcacaccgcccataattaaggtcggcaccatgcgtgaaatccctgacatcacatgctgcgggagttcaccccagaagctggttttagaggcctgcggattcttaactgccgctgccgcaccggatgcgccaggcacaacggttgcactgcgttttttaatggccataacaattatccctgtcgaatattactgttgttcagaggcaatcatctcttcgatttctttgatgatgcccgcagcgtttttaattgcgtcctgcaaagtgatttcataaacgtcgcgtgattcgaaacgttcgttatcttccggggtaactgccacggagtggatgatgatggtcgcttcggcgatatcctgcgccgtcaggcgattctggataccgtccgcgccctgggtttcaattttcacttcataaccggcttctaccgccgcttcttccagcgcctgagcggccataaaggtgtgagccaggcccatcgggcaggcacataaggcaatcagtttcttactcatcgttaattcctcgttcagtgatagttgacgagtgaaattatgaacgtgcaaaacaaatcgccgttaccagacaaataatgcatttactggagaattaatcccgctgtacggaagtgtgacgcaggtcgaccttgtgaggggacacaaagaaaaattgaataaactgtatgatttaaaagattatcgggagagttacctcccgatataaaaggaaggatttacagaatgtgacctaaggtctggcgtaaatgtgcaccggaaccgagaaggcccggattgtcatggacgatgagatacaccggaatatcatggacatattctttaaagcgccctttatcttcaaatgcggcacggaaaccggaggctttgaagaactcaaggaagcgcggcacgataccgcccgcaataaacacgccgccaaatgtcccgagattgagcgccagattgccgccaaaacggcccataatgacgcaaaacagcgacaatgcgcggcggcaatcggtgcagctgtcagccagcgcgcgttcggtaatatcttttggcttgagattttctggcaggcggttgtcagctttcacaattgcgcgatacaaattcaccagcccagggccagaaagcacgcgctccgccgaaacatgaccaatttccgcacgcaatatttcgaggataatggcctcttcttcactattcggcgcaaaatcaacgtgaccgccttcgcctggcaagcttacccaacgcttatcgacatggaccagatgcgcaaccccaagccccgttccggcaccgtaaaccgcaataggcttaccttcgaccggttctgcgccaccaaactgaatcagatgctcttttttcagcatcgggatcgccatcgatacagcggtaaaatcgttaataatttccagatggctaaaaccgagattctttttcatttcggcaattgagaacgcccaggtatggttggtcatcgccacccagtcaccggtaattgggcaagcgatggcaatacagccgtctttcacctcgaccttatgttcttcaagataaacgcgaatgaccgcttcgaggctggggtaatcaagccctgaataggtcttagcctgcgagatttcaccactggcaatatcacacagagcaagacgtgcgttggtgccgcccacatcaccgactaatgcatactttgtcattcttcaactgctccgctaaagtcaaaataattctttctcacactgtaaatacctgagggcataacaacaacgccggaaaggcaggctccctgtaaatatcgatctgggtcacacaattactttatcgtttcagcaccaattgcagcgatgcctttttgcaagctgggcaaactaagtatctgaccccgcataaggaatagaacatgctccatccgcgagccagaaccatgttgttattatcgctccccgccgtggcaattgggattgcgtccagtcttattctgattgtggtgatgaaaatcgcctcggtattacagaatttgctctggcaacgactgccgggaactctggggatagcccaggattcacccctctggatcatcggtgtattaacgctaacgggtattgcggtggggttggttatccgtttcagccagggtcatgccggaccagaccccgcctgtgaaccgctgatcggcgcaccggttccgccctctgcgctacctggacttatcgtagcattaattctcggtcttgctggcggcgtcagcctggggccggaacatccgatcatgaccgtcaatatcgcccttgcggttgccattggcgctcgtctgttaccgcgcgtcaaccgaatggagtggactattttagcctctgccggaaccatcggcgcactgtttggcactcctgttgcggcggcgttgatattttcgcaaaccttaaatggcagtagtgaagttccgctatgggatcgtctctttgcgccgttaatggcggcagcagctggtgcacttactaccggattatttttccatcctcatttttcactgcccattgctcattacggacagatggaaatgaccgatattctcagcggtgcaattgtcgcggcgattgccatcgcagcagggatggtcgccgtatggtgcttaccacggttgcacgcgatgatgcatcaaatgaaaaatccggtgctcgtgctgggtattggcggatttattctcggtattctgggggttattggtggaccagtttcgctgtttaaagggctggatgagatgcagcagatggtggcaaatcaggctttcagcaccagcgattactttttgctggcggtaattaaacttgccgccctggtcgttgctgccgccagtggctttcgcggtgggcgaatcttcccggcagtgtttgtcggcgtggcattagggttgatgctgcatgagcacgttcccgccgtaccagcggcaataaccgtttcttgcgctattctcggcatcgtgctggtggtaacacgcgatggctggttaagtctttttatggcggcagtcgttgtacccaataccacattgctaccgctgctctgtatcgtcatgcttccggcatggctgttattagcaggtaagccgatgatgatggtcaatcgtccgaagcaacagccaccccacgataacgtttagcaaaaaatgctctcctttatgatttaagagttatggcgatgatacggggctttacctccccgtaatattgcgttaacaggccgctgacggcttcgagcgtgaaggagaataacaatgttcaggtcactgtttctggcggccgccctgatggcatttaccccgcttgcagcaaacgcaggtgaaatcaccctactgccatcaatcaaattacaaattggcgatcgcgatcattacggtaattactgggacggtggtcactggcgcgaccgtgactactggcatcgcaattatgagtggcgcaaaaaccgttggtggcgtcatgataatggctaccaccgtggctgggataagcgtaaagcgtatgagcgtggctatcgtgaaggctggcgcgatcgtgacgatcatcgcggaaaaggccggggtcatgggcaccgccattaaacgcgtccgccaatggagcacaatgcctgatgcgacgctagtgcgtcttatcaggcctacaaaccggctctttaacgcgtagggcggataaggcgtttacgccgcatccgccaatagtgccagatgcgacgctcattcaactacaatcccagcgccgtccccaccaacaaccagatattcagcgccacgaccagcaccacaatcacccagcctgtctgttttacgcgtttgctgttcaccagatcgcccatcaacttgctgtcactggtgaaaatcagcagtggaaccagcgccagagcgataccaaaacttaacagtacctgactcataaccagaatccgtgtcggatctaatcccatcagaatgacaataaatgacggcaacatggtgactgtacgacgcacccacagcgggatatgaaagcgaatgaagccctgcatcaccacctgccccgccagtgtccccaccaccgttgaagacagccccgcagcaaccaggcttaatccaaagaccgttgccgcagcgtggcttaacagcggttgcagcgtcagataagcctcatcaagatcggcaacaccagtatgaccggaaaagtggaacgccgccgcagctgtagccatcatcgccagattgacaaaaccggcaatagtcatggcgatagccacatcccatttggtggcggaataacgttgttgacgcgaaccgccatgtaaatgctgagtgagcgaggagtgcaaataaatcacatgcggcataatcgtcgcccctaacacgcctgctgccaggaagaccgcttccgaagtaggtaaactcgggatcaccattcctttacccagctgcgccaggttaggctgggagaaaatcaactcgacaatgtaagccgcggcaacaaacaacagtaacccgccaatcactttctccagcggtttttgcccgcgacgttgcagcattaaaatcaggaaagtcgcgatccccgtcagcaccgcgccctgcaacaacgaaacaccaagaatgagtttaaaaccgatcgccgcaccaataaattccgccaggtcggttgccatcgcaataatttctgcctgaacccaatagaaccacactacgggacgcggatagtgatcgcgaatctgctccgccagatttttaccggtggcaatccctagtttggcagagaggatctgaatcagcatcgccatcaggttggcccaaacgacaacccacagtagctgatagccgaagctagcacccgcctgaatattggtcgcaaagttaccgggatcgatataaccaatcgccgcaatgaacgcaggtcccattaatgcgagcctcatcttgcgcgccgcccgtccgctgctactctcaacgcgatagttcgtcatcttgtgcctctaaaacatagcctttgctatgtttcatgctatgccaaacgagaatgattatcaaattcatttaaatggattgtggtgatttctctgatagaccaggattatgactacgaaaagattgatgacttgaatgttatggttatgtttaatgttagcacatttacataactttcagcttccatacacaacatagcagaaatgtatgacagatcactatttttgaagcctgtcacaggacgtcattatagtgtgtgtcagatctcgttttccttaaccatgttacatagaatgtgcacggaaatttaacctgcctcatatttggagcaaatatggaccgcgtccttcattttgtactggcacttgccgttgttgcgattctcgcactgctggtaagcagcgaccgcaaaaaaattcgtatccgttatgttattcaactgcttgttatcgaagtgttactggcgtggttcttcctgaactccgacgttggtttaggcttcgtgaaaggcttctccgaaatgttcgaaaaactgctcggatttgccaacgaagggactaacttcgtctttggtagcatgaatgatcaaggcctggcattcttcttcctgaaagtgctgtgcccaatcgtctttatctctgcactgatcggtattctccagcacattcgcgtgttgccggtgatcatccgcgcaattggtttcctgctctccaaagtcaacggcatgggcaaactggaatcctttaacgccgtcagctccctgattctgggtcagtctgaaaactttattgcctataaagatatcctcggcaaaatctcccgtaatcgtatgtacaccatggctgccacggcaatgtccaccgtgtcgatgtccatcgttggtgcatacatgaccatgctggaaccgaaatacgtcgttgctgcgctggtactgaacatgttcagcacctttatcgtgctgtcgctgatcaatccttaccgtgttgatgccagtgaagaaaacatccagatgtccaacctgcacgaaggtcagagcttcttcgaaatgctgggtgaatacattctggcaggtttcaaagttgccattatcgttgccgcgatgctgattggctttatcgccctgatcgccgcgctgaacgcactgtttgccaccgttactggctggtttggctacagcatctccttccagggcatcctgggctacatcttctatccgattgcatgggtgatgggtgttccttccagtgaagcactgcaagtgggcagtatcatggcgaccaaactggtttccaacgagttcgttgcgatgatggatctgcagaaaattgcttccacgctctctccgcgtgctgaaggcatcatctctgtgttcctggtttccttcgctaacttctcttcaatcgggattatcgcaggtgcagttaaaggcctgaatgaagagcaaggtaacgtggtttctcgcttcggtctgaagctggtttacggctctaccctggtgagtgtgctgtctgcgtcaatcgcagcactggtgctgtaagaccatacataaaaaagccggggataattccccggtttttttacgcctgttaatcagctaatggctgcgggcgaccaatcaaatacccttgcagatattgcaccccgagcttatgcaatagcgcctgctgctgttgcgtctcgacaaactccgcgaccacactcaatgacttcgctttcgccagatcggtaattgatctcacaatcatcgcatccagcgtgttcgtgacaatatctttcacaaagacgccatcaattttgatgatatcagcctgcaaacgctttaaccgttcgtagttggcatatccggtgccaaagtcatcaatcgcaatccggaaaccaaacttatgcagctgctcgatgttgtacatgctgctttctgcgttagaaaacgcctgctcctcggtgatctcaagaatgaccgcctgcggggagatgtgataacgcttaaacagacgaataatccgcccggcaatattcttttgcagcagcgtgagcggcattaaattgactgaaaagcgcggtccttttttgtcgcaagggtgtgttgccagccacttcaacaaggattccagcacttgcaaatcaaaacgcgcgctaaggttaaactgagcaataaggggcagaaacttatccggggtcataatgccgccgtcatatttcagtcgcgcgaggatctcatcataaccttcaccctctttgttgcgaattggctgggcgtagagcagcaaatcaccctgatctaacgccgtgcgaatggtattcagcaatagcacctgtttagtggtctgcccgaaaaccatctcctctctgctatccagcgccagcacatgatgatgtgcgcaggattgctccgccagccagcttaactgccccaacaagggttgcagggtttcctgatttccatcaaaacgcccccaggcagcaccatagcccatatccagcccggtattgttccagtgaatttgccgactattcaggatgttaaccatatgctggagtcgcccttccgtttccggcccgctcagcactaacagcagttcactacccggcaattgatacaacttttcgttttcctgcatcaacggcagcagcgtacggcaaattgagcggatacagtgaacgcgcatcattaagccgtaatgacgactcataaactcaagattatcaatgcgcaggcagcaaaaactcttgcccgcctcttgctccggcgcttgttccaacgcacgaaagttgggtaggagcgttaacggatctgtcagcgcctgcaaatgccagcggcgattaagccattcactgcgatgataaatgcgcaccatatagagcaggcaaacgctaaaggaaatcagcaccgcaagaataaatgccagcgaatattcggtttccaccccttgcaaaaagttctggttgtaattcagaaggcaaagcgttgaaacagcccaggtgagatttaaaaacggatagcgaagcttaccgaccccgagggtaaagatgatgaagaaaacgggtaccaggtaaccggcaataaagtcgttttcataaggtgtgcacaacagaagtagcagcacgcttaacgctgccagccagcttaaggtaaatgcgcgtttctctttgcccaacgacggagcgatatccctgcgccacaatatctgcgcaaagtggggacttacaatcatgcgagtgagatagtagaaaagcatgttgtaaatcagcacagcggtgaaaaggcttagcaaatcaacgaccgtgaaaatggcatccgcatcgccgaaaaaggtggatatctttagcgggaaatcaaagaagctccccacaagatacatgctgcatttgatgccgatcggcgtcaccaaaccaagccagaacagacgttgccagacatatcggctggtcaatccataacgccaacgcgtccccagctgccagcgtaatattgcgcaggcacacaacacgacaaacgtctggctaccgagcatgaccgcagtctgtaaaaaagagagatgaaagttccacagattggtgcaaaacatcccgcataaaacgggaacgacaccgcgccagccaaagataaacaagattgacagcattacgcacagtggcatccacgccagaaagatataactggaatggataatggcaagtggcgaaataaaacgggatagctgaataagtaccacggtgagcgtaaacgctagtgtgaatatcttgatattttttatcaggttatgctccacaaacatgagtacactactctcactgatcggggttttcaggcacacaaataataagtttattcgcatcgcgaagcaaacagggggccagcctgttgccgatttttcatccaatgatgctttcaccaggcggcactaacccggacgtagactgtattacaaaagcggcaaaaagcagagacaaaaaacccccgctttgcagcgagggttggaaatttggtggagctaagcgggatcgaaccgctgacctcttgcatgccatgcaagcgctctcccagctgagctatagccccacgatgcgtttacgtaccaagtttgctgggtgcaaaatttggtggagctaagcgggatcgaaccgctgacctcttgcatgccatgcaagcgctctcccagctgagctatagccccgtcacgtaaagcttgtcgagttgacgggcggcatcatatgaattccgcccgaatgtgtcaacggcaaattgcaacgtgtagtttcaatcgctgaaaaatcaggcaaatgaacaattttggaaaaccgctcgcattcagtagttattcatgtcacggtttcctgtaaagtggtgttataaaatgaactactaatagacccacatacattcagggaattgttatgttcaaggagaggatgacaccagatgaacttgccagactgaccggctatagccgccagaccattaataaatgggtacgcaaggaaggctggacaacgtcaccaaaacctggcgtccagggtggcaaagcccgactggttcacgtcaatgaacaggttcgtgaatatattcgcaatgctgaacgtccagaaggtcagggagaagcgcctgccctttctggtgatgcgccgcttgaagtattgctggtgacactggcgaaagagatgacgccagttgaacaaaaacagtttacatccttgcttctgcgggaagggattatcggattgttacaacgcttagggattcgcgatagcaaataatatgaaaagattacgcaataaaatgaccaccgaagaactggctgaatgcctcggtgtggctaaacaaactgttaaccgttggatcagagaaaaaggctggaaaacggaaaaatttcccggcgtgaaaggcggtcgtgccagacttattctggtcgatacgcaagtttgcgagtttattcagaacacgccagccttccataacacaccaatgttgatggaagctgaagagagaattgctgaatacgctcctggagcacgcgccccggcgtatcgacaaatcatcaacgcgatagataatatgacagacattgagcaggaaaaagtcgcgcaatttttgtcacgtgaaggaattcgcaatttcctcgcccgtctcgatattgacgaatcagcataaataaaaaacggcaggatattatctcctgccgtttatctttttacacgctaattactgctgattttcgcgttcagcaataaaatccagcgctttgttgatacgctcgatactgcgggtcttaccaattgcgtgaacggtaacatccagtgctggagactgccccgcaccggttacggcgacacgcagcggcataccaactttacccatacccacttccagctcatccgccgtcgcctgaatagcgtgatgaacgttttcagcggtccagtcagtaatcgcggccagtttgtcacgaaccacttccagcggctgacgcgctaccggacgcagatgttttttcgcggcgtcggcatcgaactcagcaaaatcttcgtagaaataacggcagctctgtgccatctctttcagcgtcttgcagcgttcgcccagcagtttcaccagatcagccagctgcgggccgttacgggtatcgatattttcctgctcaatgtgccactgtaagtgagtagcaacatactccggcggcagcgcgttaatgtagtgatggttcagccacagcagcttgtcggtgttgaacgcactggcagatttgctgacggcattcaaagtgaagtatttgatcatctcttcacgagtgaagatttcctgatcgccgtgggaccagcccagacgcaccagatagttcagcagtgcttctggcaaataaccgtcatcacgatactgcattacgctgactgccccgtgacgtttggacagttttttaccgtcatcgccattgatcatagaaacgtgcgcgtaaaccggcaccggcgctttcagggccttaagaatgttgatctggcgtggcgtgttgttgatatggtcttcgccacggataacgtgggtgatttccatatcccagtcatcgacaaccacacagaagttataggttggggaaccatcggtacggcggataataagatcgtccagttcctggttgctgaactcgatcggaccacggatctgatcgtcaaaaacaacagaaccttcctgcgggttagcaaaacgtacaacacacggttcatcatcagcatgatgctcatggctgtggcggcagcgaccgtcataacgcggcttctcacctttcgccatttgctcttcgcgcagcgcttccaggcgctctttagagcaatagcatttataagcagtgccctcttccagcatctgatcgatcaccgcgttgtagcgatcaaaacgtttggtctggtagtacggaccttcatcccactccaggctcagccagttcatgccatccataatggcttcgatagcttccggcgtggaacgctcaagatcggtgtcttcaatacgcagcacgaactcaccgccgtggttacgtgcaaaaagccaggagtaaagagcagtacgcgcgccgccaacgtgcagatagcctgttgggcttggcgcgaagcgagttttgattttcatgaaatggccttacgtttagaaagatgccgacaaccggcaaatcctggaaaaattaagtgggcgatattctatcactcccgcctgattcctcaatgtagttcgggtttctaccttacgcattattgttttcgttgacaaattgcgcaacacggtctgttttgcgatcatcttgcttaaatttacgacgaacgaacaatttctttagaaaatgcgttgactcattttgaactctccctataatgcgactccacacagcgggggtgattagctcagctgggagagcacctcccttacaaggagggggtcggcggtttggttttccccgttgcccacattccgttttgccgcttctcccaaaccaacgtttatgaaaatgcagaaataacgagcaaatggcatcattcctgcttttgtcagggagatccaccatgcttattggctatgtacgcgtatcaacaaatgaccagaacaccgatctacaacgtaatgcgttgaactgtgtaggatgtgaactgatttttgaagacaagataagcggtacgaagtccgaaaggcccggactgaaaaaactgctcaggacattatcggcaggtgacactctggttgtctggaagctggacaggttagggcgcagtatgcggcatcttgttacgctgatagaagagttgcgccagcgtggcgtgaatttccgaagcctgactgacagtattgataccagtaccccaatgggccgtttcttttttcatgtcatgggtgccctggctgaaatggaacgagaactgattgttgaacgaacaaaagctggactggaagttgctcgcgcacagggacgaattggtggacgtcgtcccaaacttacaccagaacaatgggcgcaggccgggcgattaattgcatcaggcgttcctcgccagaaggtggcgatcatctatgatgttggtatatcgacactgtataagaagtttccggtcggagataaatgaaaccgtagcacgtcgtatgcaagaagatcgtgctgcggtttatgcttatcacttaaagactcaaaaattaggtgagtaacggaccggggacatagctcctttttttcttaattcatctggtattttttttccaagataaagatttgctatttcaggtggggcttctcgaccttcaaaaccatagcgagaactttgtgttgcctcaaagtccggatcctcgtcccagtatttcatcgtagggaaattttcacgtgttgatttgagccatttatcagcaatgaaaacccctcgaacgattccccttacagtagcaagaatgacttctgcttggctggcgcgagagacattaatgcgccagctaaatcgaaccgcatcataaagctctgaatcctttgcacttctgttaacggaaatcattaatgctttatgatgaaatgttatggtttcgggttgatatgttgctatcaactctttgacatgcgcggcgccgaattcattgctgccagcaccattcatgatattcgttaacccagggtaggcatcaataagtgctgcttcaacttcgtacgccgtcttttcatcagtcattccatgtcgatggatgacatggataacttcaagtcccgctaatcttatttctctgatttgctttagcttgttgctcagtaactcgtcatcatcagccgctgccacttcaccgcgcatatgggcaaatacgcggttacctttgcctttccctacatagaaggtgcttccgtccctaggatcaatcaatcggtatacataccagccaaggtgttcaattactccagaaggaaactcagtaatatccattttgcaatatctgtgaattatttgtgagacgtatattaatgaacattgcaagggctcacaactagtagtgttgagaaagccatcgggaaaatgaggctaaccctttgaatttacatagcgcaaaaagatacatttcctcataatgtgagctaattttatgtttcgtttgatgatcgggtcggtctcgaaacccgtagccacgtcgtatgcaagaacgtgctacgactggctggtgaacttccgatagtgcgagtattgaatgatttccaactgttatcgattttgcgtattttttgcatgagaggatttttacctcctcccaccgatcctccatggctttacgccagtgtctctggtctgctatgtgccaagagcagacgctggtaattcgtgcctaatatacttcacttaacttatatcccagctttgatacagatcatacaaattaaatgccccagtaattggcaggctgagtaacttaaaactccttagaatataggatgatttgtatcggcactcattccaccatgcattccgattaatcccgcatagccagttgaactttgctactctgtgagaggtagtaccttctatccagtgcggatttaattaatggaataaatgattatgagtgaaaatgatacaaccccaaagaagtctacaagccaggttaacaaagcggtattctttacatctgctttgctaattttccttcttgtcgcctttgccgccgtattcccggatgtcgccgacaaaaattttaaactacttcagcaacaaatcttcacgaatgccagctggttctacatacttgctgtggccctgattttactgagcgtcacgttccttggactctcacgttacggtgatataaagctgggcccagaccatgcgcagcctgatttcagctaccactcctggttcgcgatgcttttttcggcagggatggggatcggcctgatgttctttggcgttgccgaacctgtgatgcattatctttcgccacctgtcggcactccagagaccgttgcggcagcgaaggaagccatgcgcctgacgttcttccactggggtctgcacgcatgggcaatttatgccatcgtggcgctgattctggcctttttcagttaccgtcacggtctgcctttaacgctgcgttctgcgctctatcccattatcggcgatcgcatttacgggcctataggccacgcggttgatatcttcgccgtgataggcactgtctttggcgttgcaacatcgctgggttacggtgtattgcaggtgaatgccggtttgaaccatcttttcggcgtgcccatcaatgaaacggtacaggtcattttgatcgtggtcatcacggggttagcgacgatttcggtggtgtccggcctggacaagggaatacgcatcctgtctgagcttaatctgggcctggcggtgttgctcctggcgctggtcttgtgcctgggtcccactgtgcttctgctgaagtcatttgtggaaaatacgggtggttatctgtcggaactggtgagtaaaacgttcaacctttacgcgtatgaacccaagtcgagcaactggctggggggctggacattattatactggggatggtggctttcatggtcgccgtttgtaggtatgttcattgcacgcgtttcccgcggcaggacaattcgtgagttcgtgactggcgtgttgtttgttcccgccggctttacgctcatgtggatgacggtgtttggaaacagcgccatctatctcatcatgaaccagggcgccactgacctcgccaataccgttcagcaggatgttgcgcttgccctgtttaatttcctggagcatttcccgttctcttccgtgctgtcattcattgcaatggcgatggtcatcgtcttctttgtaacgtctgctgattcgggggcaatggttgtggatactctggcatcaggtggggtggcaaacacgcccgtctggcagcgaattttctgggcattgctcatgggcgttgttgctattgccctgctgatcgcaggggggctgagtgcgttgcaaaccgtaacgatagcgagtgcattgcccttctcagttatcttattaatatccatatacggactgttaaaagccctgcgtcgggatttgaccaagcgtgaaagccttagcatggcgactattgctcctacggctgcacgtaacccaattccctggcagagaaggttacgcaatatcgcgtatttgccgaagcgctctcttgtgaaacgttttatggacgacattatccaacccgccatgacgctggttcaggaggaacttaacaagcagggaacgataagccacatcagtgacgccgccgaggatcgtattcgccttgaagtcgatttgggcaacgagctgaattatatatatgaagtgaggcttcgcgggtataactcaccgaccttcgcgctcgctgcgctggataatgatgagcagcagagtgaacaacatcgatattatcgcgctgaagtctatctcaaagagggcggccaaaattatgatgtaatgggctggaatcaggaacagctgattaatgacatactggaccagtacgaaaaacacctgcacttcctgcatctggttcgttaacagcaacatgccgccacagaggcggcatttatttatcccggctgcaatatgagggaatgcagaatgatttcacgctggaaatggatgctgaagcagacatttaaaaaactatggttcagggcaacgttattcgcaattgtcgcaataataacggcccttttatcaattctttttaaatcaatgatacctgagtcggtttccgtgaaggttggtgcggaagcagtcgataacattctgaacatactggcatcgagtatgctggcagtgaccacattttcgctgagcatcatggtcacagcctacggttcagccactactaatgtgactcccagagctactcgtttagttgttgaagacgtcaccacacaaaatgtactggccaccttcatcggttcttttctcttcagtctggtagggattattgccctcaatatgggagcttatggagaaagggggagagtcattttattcattgtaacactggttgtcattgccttaatcctcatcacattgcttcgctggatacagcatttgacctctctggggagggttggtgagacaacggcaaaagtagaacaggcggccatcgaaacatttattgcgagagcaagaaatccctgtctcggcggatatccatggcttgagaacaatgaacagccgaaaggaacggttgcagtttatccgaaaaagattggctatgttgaatatgttgatatggtgaaactcagtaagctgctgaccaatgatccccgtcatgtatacctcgtggcgcagccgggcagtttcatacatccgtccacgccagttttgtacctgagtcagggccaggagtcatcaatcagcaccgatttacttgagacgattattgtctcggatgtacgttcatttgctcaggacccccgattttgtcttagcgtcatggccgaaatagcctgccgagccctttcccccgcagtgaacgatcctggaaccgccattgatgtcattggcagaggtgtacgtatactttccgcttacgcgcagaataaatctgatgaaatagaagtgaaatatccttctgtacatgttgcaccacttcagaataacgatctacttgaagactttttctcacctgttgcgcgcgatggtgccagtatgagggaaattcagataagggtccttaaaggactgtcgatgctgagtaagggttggcctggaatttttgctgaagccgcacaaaccctagcatttgaaacattagagcatgctactcgtgctgaccatatagattctgacagatatctaataaaatcaatttattataatttatttagtggcgaagattctaataaaaaaccatagttgcggagcaagcgatacggttgttggcaagtcaagggcaaagcattcgcgtgagagtgggcgtctgctttgtgccaaaagcgggcattgggcgttgtggtaaatgcctgataatttcttcttttactagcacaagccgctggataattcccatgtgtccagcttaagtaaatcaagaacaactcgcgtactggctgtataaagtttgccggacgcaaatttattgatttcagaaaaacctgttgaaatagaggtatatcagcgttagtttgatgtgagtaaagatcaggaaagaaggcagaaaaatgttccacttgcgggcaaaaaagccttctattaaattgttaaggctttatgaagatcgtacattacgaatcgaattcaccatgggtagggaacatgaaatgtccaaaccctaagtgcgggagaaatgactcctgcttgattcgggataggttgtactcgcatgaagtatgtattggatctaaacccaaatactggtggcgtttgctcacaaataccttaacaagtttaggtatgggacgctcctaacgtcgcgcccctgctaaaagcgttagctgttctctagccttcaaccagataaggaaataatcgtatgagttcagaattgattgcaaaacctggaacaggggtactttccacagatacaacaaaatttgaaggatatttatcctatcttggtttgccgaccgaaaatataattgcctctctccctgagcgccaaattattgaaaaaaacctccccacattcatagattctttacctgctgaggtaaaaagagatgctcgatatttatcaaagttcgttgctggtgcggctataggactatttgatgcatcgttaaattatgtttggaatgaagttgtactgaatttaagggaaaaagtagtagtttatggcctcgatatgttctttgatgctgcagttggaggaggacgtagagagctttattctaccgaagaagatctttctggtttaaaagacaacacccttattaatacttgccgaaaacttgaattaatatctgacgttgtttacaccaagctcaatcatatattgactatgaggaatgacattggtgcttcgcacccaaattcatactccataaatgcttttgaacttcttggctggctccaaacatgcgttcaagatattttgaacgacaaaccgtccgcgtctgccatacaaataaaatcattccttgagaatctaaaaagatccactgatgttcttgatgaagccacaattcatagcatggaaagacctttgaatgatctgtcgcttcagaatactgacaatctactcaatagtattttcggcatatatacagctgattcaacaggaaatgttgtcagaaaaaatatcgctctttttgctccgcatatctggaataaaagcagtgataacgtaaaatacaagctcggcgtgacgctagacggatacaagaacaatcttcacaacgagaaacatgctttaggtattgagttttttacgttttgtgatggtaatcgttatcaatcattagactctagaattatatcactggacggccatgccgacgatctcttagaggctaggtatgcttgggataacttttataatgaaccccctcatatgcggaagattctttcgtatttaaagactgaaaatgacatacctttagagagggttcataagcttataaaaacagttttgatttgtcgtgttggtaaaggaataccatataatactggtgtttctccggcgggacgacctttgtatgatcagttttttggcatgcttggcgatcaaaacattatcaatacagttatagcaatgcactctaatgaagtgcgagtgaatttagacaacaaatactgccagcaacatatggtaagcgttttgactttgttaagagccaatgctcgtagcgaaagaattcaagaaattatagattttttgatcgccaaccaaacgatcctccataaagtacacaacgataagagatatagagatctaactaaaaatcacatcagttttggctaacaaagcgctgcacacggactaaattaagcttcgctcactgggacgggctacagcccgtcccttaaccaaacgttaatgtctgcaattcgctcataacagacataaacttcagttatggcataaaggtatgcatgctgggtggggaaagtatgaaggaaaagaagactgctgcgccgtttgtcgtcacgtttatcttcattggctatgcaagtcgtaatacaaggtgggacaaaactgagacacataaggcctcgcaatggcttgcaaggctttacatgttttgatgtggtgggacgtgtgagcgcagtgttgatggggtaatgctttgaattagaagtggattcttataattcgtaatgcgaaggtcgtaggttcgactcctattatcggcaccatcaagaaaatcaataacttagcttaacttctctaagaaattgtatcttctgttatcacttacaaacgcctatacgttgttatgggctttggtagtgtaacacgtatgggcgagtagttcccaggctcaacctcgtaacaagttcctttgaagctggaagacgtgccaccgtctctaaaccttctaccaaaactcttagcaagatgttccacacctggcgcggtgtccaatgatgctacacgtcgtgagacgttgcagaggataaacaggctaaatgatgggaagagttttaagtgcaatagtggattaaagcccacctcttcaaaacctaacttgatcgggaaagaatcaagctctagcacggtttcgtccaccggagtacaacgggtgcctgataagagaagaactgctaagacttcatagcttttgtgaaaaagccctttttagtggatacgcctacggcgcttattttttggtataaccatcaaaggcgctttatggctcctattgtcttgaaaatgtatctttacttgtattgtgttttatgcgtagtctccctgtgtagtatgtaacttgttaattttcatatgaatacagaggcacacgatgaaaaacattgcagctatcaaacgtaataaccgcaagattcacgctcgtaagttcctgtctacgccagagggaaaagcctggctagaacgtaaacagcgagagaacgaagaaagaaaactccttagtgagttgaaatggcttaaggattgaatcaccagtaggcgcataacacatccagcgatcaaagatgtgtttatgcacctgatagtgaaattattaaagtcgtttagttaacatcgccattgcttgagcaataattgcaacagcgtccatctcttcactggaagcgatgcaaatgcggtaactaatagccacaacgaatacatcaataacgagaaagtgaatagtgtgaagatgttttgaaagtaaatgcataacttcctccggtttgtagataggaggattagaacacgcattaaatgatgttgcaacaatggcaatttaccctaatagtctactattcacctcaatctacgtcaaccaatatttgatgtagatttaattttcttttaaaaacaatatgttgctatttgttgggttttggagttaggttgttttttggacgtttccatcaagtgtaaagatacgtctagccttcatagtgagttcagttactgtctttttctctgaaatcggcgcaaacgtgatcatcgcttgaggttgctgctcttacttctcaaattgtgatggagaacgataaaggttagagggcacttttatttttttaagcaagtgtatagcataagaataatctaaaaagggaggttatatgcgcaggtctgcatttgtgaggatgatgatttttacaacgttgtttgtagggggagcttctaccgcagttgctaaaaactgcaaaaaaggaataccttgtggtaactcgtgtatagctgttggtaagacgtgccggattggctcttatgccccttcatcttataaaaatcattcatactcttatccttcatcctctattcgaagctcgcaatcaaataattcacgaaaaactgaaggagtgaaaacgactcctgctgccaaaaattatctttgccaatactctattgcatcaatcgaaaacggacgtttaggggcattacgtgttcagggatacgcacaagtaactttatatgcagatagcttcaaggctaacagattaaatggaacatatttgatatcgccaaaactgtatgctaacggcaagtttatgatggcagatgataaaagcaaggtttatgcttatgattcttggctattaaattttgcaataagcgatcgtatcacaagaacgacagaacaatgggatcgatgtaagctcaatcaaaaataacagttagagaagctcttgtagaggcattattgagttattggttttaatatttttgtgcctctatgggctttttttgcctttttgcaatgtaggagagagcacaggaatcgttaaaattaattattggggtatttaaggttattttcaggtgatttaagggtattaaacttgatttaattggttaaaatataaacagatagttctgtatcttattgatttataaggttatttttaaataaaggtaaataaaaaataaatagctataaatacatcttaatacctatatcccttcccttatggctagattgcgagaggtgcttaacgcgattttcagcgccccccgatctggaaaatccagaatccccaaatatcagcaaggaatttcttgcacaatcaacatcgtttttacctattaaatcattacacagaaagcctttctgtaatgcctctcactaaactttcactaaacacgagaatgatcggttttatgtcggatctgatgctagaaacagcaccacgtctcacaagggctgtaagcgatgaaaccagtgtttatgcgggtgcgggtcaaaatataggccaaaatccatttaacataataatcgtaatatgcactaaggaacacatagaacgccttgaattgatgtatcaggggaaaagtgatggattttttacgtaggagcacgagagggcttctgttgacttttgtatgttatgaaatataattaaaggttttttgtttttatcgtgtgatgtagtggattacacagggggatagattaaatggtgttctgtttatacaggtttatttgttagatcaacaatttggcatttctaaacagatgtttgaacgttgccaaatgttttgacaacacaagaaaagggcttgctatgccacgcattacacgaaataaggctataaaaacaaaataaattttaaaatttgcacaaacgagagaactcattaagaaacaagcagaacaatttttagccaacaatttatgatggtgtgttgtaagccgcattacacaaggctttgcgaaagtgatgtaaaagtgaagaaagtaagaattgaacttttaagctactttttcattgaatttttagtatggaattacacaggaataagttagggatattctatgatttacacagggaatatagggggattatggcacacacatagaaaggcattacacagagtgctatgtgacaaatggatgtaacgagaggttacattcagctatctgaaatgctctttgtaagaaagttggtagtaatgatatgttacatagactaattattgaatgtaacgatattacacatcggtagtaacgatacgttacatcgacagatgattggatgtaacgaaaggttacacaataagactatattatttataatactaaataaaactatattagattattaattagatcataataatattctttatatctatatatatgatcttttgccttccggcgttagcttcactctctggcaagcagccttactccgctacctttcgggcttcgtggctggcccgttccgctcacaccgaaagcaaagcgttactttcttcgtgtaactatcgttggcggtaacgcccacgaagaaatactattgcgctgtgcgcagaagagtaatcacctaaccaatcatagattgcttatgtgttaactctctctacctcttaattccacttcctacatttaataactctcgttattctctgtagttgtgtaattactcgaagagagagcggctaaagctcaattacactctgctttcctcgtgtaatttcactaagcctcaatacaattccacttcctacattctgtagtcgtgtaattgttttcggtggaaaagccagaggcgacaccgaaagagaattctgatcttattaatcttatctatcttagttaatcttcttacttatcttacttactttatctactttattattaataatagctttataagctctgtgtagctctctgacgcaagaaacagagttcaggaagggaatcaccttagaaaagtgttctttgcgtcataatgtgttttatgaaggattcagaggtgtttcataacagagatgtatagaggatactttaattaattaaaaataaggggtctaaatgcttctctaacagcattaagcagggtagggaatggaaacgcattgtctacatataataagctcactacagagctttacagagcgttttataaagtgactctctatcttatatctaccatcaccttttcatatacctaccaaatacaaaataagctccttaaataagcctatggcgagctaaacagccattacataagggaatgtattgcttttatcaaaacttcgttagaacgcgttttagagcgttttagacaataatgaagaatagcactacacagaagagcacgaatagctaagaaaaaatgtaagtgaatgaaaaagatcagattttttatgaaaaggtattgacaaacgtctctttctgtgcaataataggtattagaggggacgggaatagattcttatcctctaaataattaaaccaatgcaccgcactttgaagcccaaggcttgcaaggtgtctttttcttttaaccaaatagaataaggaggctaattaatgaaatatttcactccacaggatgtagtagaagcctggaaacgtggtgagatcaaccgctttaaagtaaggatgtatagaaacaccgctcgccgttgtggttatccagagcgtgaaaaatgttttgacgatgcactgaaaattattgatgaactgcgtaaagctgagaaagaataatagacaagagaaggagaaaactatgagcgaaactaagaaaccaattccgcgcacttacctacacgttgaccctgaaatcttcaaggttttatttgctgaagccaagaaaaggcaaattatggtcagtgatttgatgttagaaatcattactgaagcagcagagaacatcaaacaaaaaaagggtaagtgatcctcattcactttagtagcgcattaagcgtgatttataaggagatgattctaatgtctaaaattaaattgattcgtgaaaaataccagtatgttgataaacaaacaggagaaattaaagaccgaactttgaatataccgcattacttttgtgagattgaatttatctattcctcaagtgttgatggtggaaaagttaagtttagtgcagaaatgcaaaaattatattgctatgtttcagattgggagaaatcaggggggatatgttttgaaacacaaacgaagttaagtaaagtttgtggctgtagccgtaagacagttaatgaactgattggtcttatgattaaaatcggtcttttagaagaggtcggagaacgaattccaaaacgtcctttaaaattacgtgcgctacctctcacagatgcacatattactcccccaggagaatcatcactctctgatctttctgaggcagaagaagcccagacacaacaagaagctactgttaaagctgttcctgaacagcttccccctacagaagataataaagagtcttcttttgatgttcttgatgattgggatgcgcctttgccgtgggagacggaagaaacacctgtttcatcaagtgaaaaggtagctaatgataatgaggcatatttttctaagcattacccaaatgtgtatgaagactttgatcttcccttttaataagtaaggaggactattgatacagtatttaataaaaagcaaagtagacagaattcagtgtaatgacacaggaaaacgcatctacgaaacacttgcttacctctataaaggaaagccaacaccgctaaaatatagcgatgtgttacaccgagcagcttgctctgaagctggtttaaaattctggctgaaacagctatcaaacttcggtgttatagagattaaagaattatctttctctacattcaatctcaaaagactaaatagagaaatagacttcatctattccactctctaaaatctctctatgtaattaaaatataaaaggaaaacattattatgatagtagctatgtattggttattgttctttctcacgttagaaacatatttcggggtgttttcctttaaaagaaaaggaaaagtaaataatggcaaaaagaaaaaacaacgttgttaagaagatcggtgattcagcttctcttctaagtaaacctaaatctattctaagacgcaaagactttaaagagctagttacgctctccaagcaaaatagcgcccctggcgaatggaaaacagagatcatagaacattctccctctgtgccttgtggagatgaatttaacgccttgcaagaaatcttatcttcaacacctggcgtattctggaaacctagaaaaagaaaagagtatattgttgatagctctgatttacgcaaataccagattttaggatttgaagattataatcactacgtcggttatctcgccaccaatggcctaaataatttagttcctgaccaaattttagataatgctgatcactatggagacttttaatatgaacaaaaacacgtatgacacaatttattcactaattaattattatgaggatgattacctcctgcctttaaaccgcgctgaacttgaagcatacaaagaaaacacgccagcggcactaaatgaggcgtttaaacactgggatttagctgtgaatgcctttgagcacctctctaagcgtgtagagatgctctgtaagagtgagaacgcatatctgacagcggatcagatatgggagctatcaaactggatagaaggtatttactcggacgttcgctatgtaggagacggacttgttgaactagctcaacgcttaggcgctactatcacagaagaataaaaaaagcaacaaaaaagttgtaaaatatcttgacatttcatctattgtatgttaatataattatataggggtgattatttttcctttattggttcgatattaaaaattcttcctgtcattaaaggggagtaaatctccgctccccgcttctcctcctccttaagtgtcattattacctcttttttcctttgttatgcatacatcttggagtatgcataacatagggtaattacataggtatgagttaataaaaggcggctttaaatgctgccttttattttgcccgttatgcaacttaaaagttgtatttcttactttaaacaaggtaacaaggtttatataaatgttgttcttaaatgataaagagcaaatcatcaagtataaagatgaaatgctgaaaattaatccacaaattaccgaaatggtagctaaatacgctgggtggtctgtcgaagaagtggaacgaagtgttgaaaaatatttttctccttcttctccgtctacaccttcccttaatgaattaatcaaattaaaagctaaggagattactaaatgattattgatttagacactctgtttccaggtcgaaatcgaaagactttcacagatattgtaagttattgtactgatccgtttgcctctgtagaaaacaaggtttttgcttctcttcctgctgatgttgaatgcggcgacttgatcaccagcacgggcgctaaatatgaatcaggagatgatatctatgttgttatgagtgaatttgtaacggctggagaaaacaagcctgtagatgttttacgtagcaatgctgggcttgtatgcatcaaagctgatgcgctgaatgctgtaagtgaagcagcaaaaacagcattaattaaaaaaggctttcagcttgaaggctttaatacggttttcacttcttaataaaaggaataataataaatgattctaggtaatgattacgttgatttagctcctttgttctctgcgcatagcactagaaattatctgctttctactcttgattttactgatccggtgggcgttagttctcataaagtagctgtttcccagcttgtcgaaagcaacgaatctctctttaacaaagaaacctctcgtttctcttctgaacacaacgttactaagcgagaacaaggtaaagaatggctgattgaaatcccttacttcctgcgtgaagatgtgatccgtccttctgatgttcaaggcaagcgtaagcctggcactgattttcaggaaacactcactgatatttatgcggaatatatcgctaaacaccacgtagcgtatcagcgcactaaagagagcgtgctggcggcttctttgttctctggcaaaacttacacgcctaaaactgatgatgtgttaattgagtggggcaagctgtttaacgtatcagctatgaaagccactgtgaacgcttccagcactgacaccacgaagatttttaaagaatttgatcagattgctactgacattatcgagaaagcacaaagccaggcggctgctgtagagcgtattgttgttttctgtaagccggaagccttctctgcaattcgattctctgcgggtatggcaaacgcattccagtatgtaagcccactggaagaggggaacgttgtgtatcagcgtcgtgacctgctgccaggggtgacagcgttcactattccaggaactaacattgatgttgttaaactggtagatccgctacatcttgcacatatgaccgcagacgctgtagcggttcctaagtttgctaaaggctctaacgtatatcagaacatctacggggcagcttccagcacatttgaactgattaatgccgctcctgctgaggtgtatagctatagctatgaatcttctcgtggtgatgctgttaacgttgttacagagaatagccagatggttgtaaaccacggcgttggcttctccgttcaaatcactgttaaataatattttaacgtgtattagaggcgtggcgtgtattcacgcttcgcctttttttatttatttatttttaaattttgagaggtgattaaaatatggaagtgattttgaaatcaaaaaatggtgtacacgtacatttagatgctaatgattctagaggcttgttaaatctgaaatatctatgttctctcttggatgttccctatgaaggcgtaaaagcccgtatgttcagattaaacgagagtattgatcaggctctacaccatttcttaagtaaagaaggtggtaaatgattaataaggggattttaaatgttagaaattaacacttctaaaattaagaacacagtaacatttagtgtagataaagacagcttaaaaaaagcgaaagactctattacaggcttaaaggaattcgcagagaatatcaagccagctaaattaagatttgatactgtcactaaaggctataagaaagcacaaagtgaagtagacaagattgctcaacagaaagctaaaaccgaaaaacagaatcaaagagcacaagctgccgcagcaagagcacaggcaaggcaacaggcacaaatagcagcacgcagtgagaaggcagccttaaaactgttagacgttggatcaagcattagtgcaatgcaccgcctttctgtagctgaacaatataaagctattgcacaggctagagagatagcaaaacaatatgagcaaggggctatcagcctggcacgtatgaacagccaaatgaaacgcctacaacagcaacaacgtaagattaatggccacagaaaaacacaattagcccccgttaagggaggatcagggaattccgccactatgggcgctctgttatttggaggcgctacagcggctgctggcgtgatggctgttagtagagcgtcggagtttgttagtaacagtttcgctaacgcagagacccaaggggagctaattcaacgtgccaagctgggcggtgtagacgttaaccagatgtataatattacagaatgggcgtatagaaacggcgttgactctatgatgggtgatcaaggggctaggaaatacctggatcagatgaaagatgttagggaacgtgccgcaaaatcttacagtgaagctgaattagtgaaagacaagaaaggaaaatctgaatggaaaggcggtgataacgctattaatgaacttctaaacatcggagttattaacaagagcgaccttaaaaaatttgctgataatccggctggattaatttctaaggctgttaatggaatgatgaaaaaagggttttcagactcccaaattggacaacgtttagaagacctgggcgatgatttgatgcttacgtcaaaatattggcaacgttccgttaaagatgtacaagaaagtattaaccagcaaaaagcctctggaaaatggctaacagaaacacagcaagaatctatcgttaaattcagagaactaaacagacagctttcacagctttctgatgcaagacaagtagcatttgtagacggctttatgaagtctctcgatccaaaagtaacggaagagtttatgaaaaacctttctaatctcactccgtattttacaaagctgggagaagctacaggaagtctctttgaagctattatgaagattgtaaactggtttaatcgtaatgatgataagacggaagctattcagaaaaatatgggggatgcaccgcctttgagtaatgatggaatgaaacaaaatctttctgatctcgttcctgaacaatataaaggcgctggcactgcaacaactacacctgataatagtcattctctctttaacacgattaagggattgcttttcgatgataattcttctgtgtcagatgtaaaaatgtcagtcaatgaagcaccgataaccaatctcaaacagggtgctttaaataatcttgcaatgacaactccagcttataatttatctcctgtgtttaatctgaatcctacatttgaagtggtaacagaagttcctcttactattaattcagacacatcaagattaagcgattatgtggattttacagcgagagcaagtcgggatagcttcttgaaatcattaacattaaccagcttgtcaggacaatctaacggcgggtaattcccgccataacattacaaggaaaattattatggcgaccgccgggattttaaccatacgtgcagcaaatactccagaacaacacgttcaggctgtttacaaagcagaacaagatataaattctacaaaaaacgaaaatagcaaagctaataaaacaaaaggagagaacggatttgctattgttaccagtggactggcatcttctggcaatgacgtttatgaaaattatatggcactggcctttgacagtgttgacgacgtgaacgtgagacgttcggcagatgtcacaagctaccccgtagaaaatggtgctactgtgtctgatcacgttcaaattaaaaacaataagttctctcttaaagggcgcatctctgaaataccgattaaaagcgatcctggcttgttaaagagtgcaggggtgaacgggaacagaagatcattagctatcgactacctgaatcagattatggacagtagacagccttttcttcttgttacagaaaataaaacttttgagaacgttgttttaacaggcatcgaatacacagaagaggcaagcgaatctctggtatttggtcttagctttgaacaaatcagattagtttcttatggcactgtaaacactgtagctatcaaaacacagccatctaagaacatcggggctaatatgaaaaaacgtgttaacactgaaaaatcaagtagtgaaggtgaagacactattactcctgcctttaaacaggaatagccgtaaacgcctctaaaacgctctgtaacgatgtaattataaaagaggctaccaatctatgttgaagcctctttattgcgtctatggcgttgttttacgccttaaatttgattttttattgattgataagcctttctctatttcagggtagcgtagaagctcaatatattttttaagctctactggagaagctgcattcttgctatatgtgcggaatgtctctgtattgccgcgtgtatggcccaggagaagggcgatcctgtcttctggaatttgatttcgatcaagaagctgtgctactccgtgtctcagagaatgaaacactttcctttctgttcccttttcccctaaagcctttcgtttagctcttgtaaatctctgcgtgtgccacgtggaacgtttaccatcagcacgctctgtaatgctggcgtgatagaacaaaaagccattatgaggcttttcacgcagcgacaacaccaacggagtgataaggctatgtacaggcacaacacgcgccgcagctttcgtttttccctgtgtgatttcaaaacacagcacaccttcgatctctttcacatcgtctattgtgagacttgctatctcattgatccgcatacctgtataagcaccgataagacacaaagccatcatttctttgttttctgctgaattaccggaaaatacttgcaacacttgcaatagctctttgttagaaaatgcctcatagctctctctactttgtgccacatcaagcctatgccctcgccagggggagagcgccctttctggcgcatcgtggtaacgtgatgaagctaactcccatagctgggccattgggctgatataatttgcaattgattgttgtgaaagggttttttgcatgtgttcaatccagcctgtaacagtggtgcggctcacatcttgcaatgcaatatcaggctttttacggtaggagagaaacatctctaccgcttttcttgccttagctaaagtggctggcttcttcttcgtgctgttaattgtcaggtagatttcaagaattttaagcaatgacggacacgaagacgctgtatcttgcattctggtagctgttttggcgtatttagccttactgcgtaacagttccagcgtgttctctattgtgctgtttacaggggcgacactctcccgtagacaatggtattcatctgcaatctgatcacgctttctacgtgcaacacgaagactacttgtgtgcagacttctgacaaacgtcctttttccttcaaaaaagggctgcatatacacaggcaacgtgatcctcaaatagtagttaccgtaagaatcacagattatgtattggttaggcttgtatctcataaaatctccggctaaagtgtcggagcgtttgtaatgtgaaaattgattgtgacgcatagaaaatgatgatttttctataagattcaatcaattagtaatggtcgtaggtgatggcattaacacgagattaatcgagtgttttactcctattatcggcaccattaaaatcaaagagttaccccatatttaaatacaccacgtttcctcctgtgccgtatttgtgccattgtaaccttggcaattcatcaaaatactgttctgacatcaggcagtgcaggtgcagacatttaagccaattgctgccgccattctttgacgtagtcaatcagggcgcggagctttggtgcaatattgcgacgctgtgggaaatacagatagaagcccggaaattgtggaagaaagtcatcaagcagcgatacaagcttaccgctttcaatatatggcctgaaagtttcctgagtggcaattgttattcctccgccggcaagagccagcctcaacatcagacgcagatcattagtcgtaatctgcggttcaatcgcaaggtcgaaagttctcccgttttcttcaaatggccagcgataaggcgcaacctccggggactgacgccagccgatacacttatgggtatttcccccggaggcgagaaagcgctctccacgcccggccgcaaggatcaggacgacgggggcaggcatgaatcctcctcctgatggagacgtacagaggcgacttctgccagcacggagagtgccagagtatgcgcatcccgggctttggggaatatcccgacgggtgcccggatttgcgttgtttcctccctggaccatcccagctcgtggagcttttgcagacgtaacgtgtgggttcgatagctgcccaatgcgccgagataaaagggttttgcttctcgcgcggcctgcaacactggcagctcccggttgagatcatggcacagcaaaatgaccgccgtatcggtatcgatctgagcgctggctgaggccggaaaaagatcgaagatatggctgtcatagcctgtggctgctgcaagactcgcggttgcctgcgcctcaagagaacgtccgtaaatcatcagcctgacgcatggcctgaaccccacctcaaagccattgagattccagcccgtccgggtttgcgtgggcaggcacaccagcgattgtgcttgcggatcgtagcgcagccccaccggttttctctgttccaggcggttcagcacggcgagcagaggctgtgccgagcgtagtttatggagcgtcagcgtgatcccaccgccgcagggcagaacgatgtcaaaccacggcgaaccttcgccatagcgaatttcgcgatcgcggcctgagcccatcatctccagcgcttcaaaagcggcagcggcctccacgcagccgccagagacaaaaccgcagtaacgaccatcttcgcgcaccaccatctgcgccccgagcgggcgcgccgcgccgccgcgtatctccaccagcgtcaccagcaccgctcctttaccggacattagcgcctctacggcgaagcgcagaatggtccggtggtcatcggtgagaaacgcctgctctggcttatgccagtgttcgtctttgtcaaaaagctggtatgacattgttcctccttaaaccacatccggcagcttatcgagcagcttatccagagtgatgggataatcccgtacccgaataccggtggcgttatacaccgcgttggcgatagccgcgctcacgccgcacaggcccagctcaccgacacctttggccttcatcggggaggatatggggtcggtatcatccaggaaaatcacctcctgttttgggatatccgcatgaaccggcacctcataccccgccatatcgtgattaacgaagtagcccaaacggtcatccaccgccagctcctccatcagtgccgcgcccatgcccatagtcattgcgccaatgacctggctgcgcgcagttttcggattcaggatgcgtcctgcagcacacacagcgagcatacgccggacccgaacttctcccgtcgcgctatgcacgccgacctccacaaaatgcccggcaaaggtcgactgctggtactctttgctcagtgttccgaattcaatgctctcttccgctgtcagtctgccgcctgcggtggcttcatgtagcgtggcgcttcgggtaccgttggtaatcttgccgtcggcaaactgcgactgctcaggatcaaacccgactgccgaggcaatcatttcgcgaagcttcatacaggcggcgtaaacgccggaggtggaggtattcgcgccccattgtccaccagaacccgcagaaaccgggaaactggaatcgccgaggtgaaccgcaacctgctccagcggtacgccaagcatttccgctgccgtctgggccagaatggtgtagctgccggtgccaatgtcggtcatgtccgtttctacggtaacggtgccgttttgttcgaggtgaacccgagcacccgatttttccagcagattattgcgaaagcccgccgcaacaccgtggccgactagccactccccgtcgcgcacctgtccgggtgtggcgttgcgctgcttccagccaaatttatccgctccggtgcgcaagcactcgataagctgacggcgagagaagcagcgcgtcgggtcggcggggtcaacctgagtgtcattcaggatgcgaaactcgacgggatcgatgcccgctttttccgccagttcgtcgatcgcgatttcgagcgccatcagaccgggggcttcgccgggcgcacgcatggcgttcccttccggcaaatcaagcgtggcgagccgcaggccggtatgacgattcgccccggcgtagagtaattcgctttgctgtaccgccgtttccggcgtgccgccgggcaggtttccagaccagctttcatgtgagatagcggtgattttcccgctctggtcggcaccgatacgcaagtgctgaagggtggcggggcggtgcgtggtgttattgggaatagaggggcgggggagcatcactttaaccggacgtttcaccgctcgggcggcgagggccgccagcagcgcatcgcttctcaggaacagcttgccgccaaaccctccgccgatatacggggagataatacgcacattctccacgggaactttcagcgtttttgccagatcggtgcggcaccagtcaatcatctgatttgaggtccagagggtaagcttatttccatcccagacggccatcgaggcatgcggctccatcgccatatggctctggtccggggtcgtgtaggtagcatcaatcttcaccgcagcggaggtgaaagccccgtcaaagtcaccgacgtttttgtcgggcgtgtcttccggcggctgattgacggcctgtttttcgtccgccagggagtaagctcctttattacggcgatagtgtgcctgcaccagcgaggccgccgctcgcgcctgttcgaaggtctcggccactaccagcgcaatggcctgatgatagtgctcaatagtggggccgcctaacagcctggcggtgtttttgtcgcctttgccgagtgccccggcgttactggcggtaatgacagccagtacgcccggcgctttttgcgcggcgtccgtatcaagggcggtgaggcgtcctttggcaatggcggaaccgacgatatagccataggcggcgttgggggcttcttcatgccattcgtaggcgtagcgtgccgtgccggtagttttcagcggtccgtcgatgcggtcatggggacgaccgacaaccttcagctgatcgatcgggttttcccctgcgggtttatcaaatttcatgcctgtgccctcgcttcagccagtacggaggcaagcgttcgcttcgccaacaggagtttaaaggtgttttcagcggtgggatgggcgctggcgaacagcgtgtcatatacggcctgcgccccctgggatagctgagcatccgcagcctcaatgcgccagggcttatgtgctactccgcccagcgcgacgcgcccgctgccgtcaggctgaataatcgccgcgaccgataccagggcaaaggcgtaggaggcgcgatcgcgcaccttacggtagatatgttttccgccgagcggtggaggtaacgtcaccgcaacgataagctcaccgggaagcagggcggtttcaatgtgcggcgtttttcccggagggtgataaaaatcagccagtgtgatactgcgagtctttccctccggcgtgatggtttccaccaccgcatccagcaaccgcattgcgaccgccatatcgctcggatgggtggcaatgcaggcttcgcttacgcctaccaccgcgtgctgacggctaaagccttcaagcgccgcgcagccgctcccgggcaggcgcttattgcagggctgattggtgtcgtaaaaataggggcagcgcgtgcgctggagcagattacctgcggtggttgcctgattacgtaactgaccagacgcgccagcgagcagggcgcgggagagtaccgcgtaatcacgacgcacgcgctcgtgagccgccaggtcggtgttccgtaccagtgcgccgatgcgcagcccacccgcgtcggtcacttcaatcttatcgagcccgaggccgttcacatcgataaggtgggtgggcgtttcaatttccagcttcatcaggtccagcagattggtcccgcccgcgataaattttgcgccgggtacgcgctgagcgctaagtgccgcctcggctggggtattcactcgttcataggtaaacgccttcatgattttatctcccccgcagcatcttcaatggcggcaaggatgttagcgtatgcaccacagcgacagatgttgccgctcatacgttcacggatctcatcggcagttgtttctggagcggaaaccaaatcgaccgtgacgtgactgggaatgccgtcctgaatctcttttagcaccgctactgatgagcaaatttgcccggaggtgcagtagccgcactggaagccatcatgcttgataaaggccgcctgcatggggtgaagattatctggcgaacccaggccttcaatggtggtgatctcggccccctgatgcatgactgcaagcgtcaggcaggcattaagcctgcgaccattgaccagcacggtacaggctccgcactgtccgtgatcgcaacctttcttggtaccgatcaaatgcagattttcacgcaaagtgtccagtagcgtggttcgggtatccacctcaagctgctcggttttgccgttcaccttcagtgtcaggggcattatctctggcgcgggtgtagctgccggaacgcttgccgccagcgtagaatgaggataaaccacggcggtcgccgctgttgcggcgctcactttaatcagatcgcgacgggtcaaacttaaatcgtgcggctcgtgcttcccaacccgattatcttcggggtattcgccttggttgctcataccaggcctccggtattctaaaggggaaaataagagtgcgttgcgagagtgctgatgcttttttaaacgttaagcatagtcggcgacagcaggaggattattcttaaaacgcgaatgcagctatgagcccggctaataaattcatgttcgccgggatgttgatgatgatgggagctggtttattgctttagttgtacgatgcaaaaaccaataaggaaacctgtgattttcagctctacatcaccctgcaaatctctgtcacttctaatataaaaatagggagaaatgatggagcttatattcattggcgattaggaaactatcttgttatacaaaacaatacagttctttacatttgccttgttttatgaatactcctgaagaggtgtataacataatggtacaagcagggtagatatgaatatatttgaacaaactccaccgaaccgcagacgttatggtcttgctgcattcattgggctgattgctggcgttgtttccgcattcgtgaagtggggggctgaagttccattgccgccacgtagcccggtggatatgtttaatgcagcgtgtggcccggaatcattaatcagggctgcaggccaaattgattgctcgcgtaattttctcaatccaccgtatatttttcttcgagactggttggggctgacagatcccaatgcggctgtttatacctttgccgggcatgtctttaactgggttggtgttacgcacattatcttttcgatagtgtttgctgtcggttattgtgtggtcgctgaagtatttccaaaaattaaactctggcagggcttactggcaggtgctttagcccaactttttgttcatatgatttcattccctctcatgggactgacgccacctctgtttgatctcccgtggtatgagaatgtttctgaaatttttggacatttagtctggttctggtctattgaaattattcgcagagatttacgaaacagaattactcatgagccagaccctgagatccctttaggctcaaacagataatgcattgaatgataaaaatggcgcaaatacagcgccatttttataggttaaaaacattgctttttatattctgatgcagatagtcagtgagtatatcgcgctacttcaggatgatgtagatccgaagaacgctacagaagagaggcattgttgctggcaaatagaagaagtatcgggttttgttacccctgaaaaacgaagccccgctattatcgctggcggggcagtgcaattaattattgtatgtttataacggtgtcagcccgtatttagcccttgcacgattgcaagcctcattgacgactccgttctcaccagacatggcgaattctctgcatgtggacgatcgatttttatatatcgtgcagcaggcatttttgcccggggttcctgcaagggcaatacatcgggggtttttctgattggtaccgctcatgcatcggtgaaaaggggatatttgttcagtgagcctggcgggaatagtaccgccagcatcgtcggcttcggcccagtaaaaagagacgcggaaaaatgcacaacaggcaccacacgtcatgcatggattcagattgctcataattcaccagtacagctaaaaatcgtaaagagaacagcggtacatcgtatgtaagaacgtaccgcggttggctggggaactttcgatagtgtgagtattgaatgatttccagccgttaccgattttacgtactaattcgtgattaaaccactcgttagcaggctgcctgatacctttccgtgtctcctgaacactatggtgtgcatatgagaaagcccatcgttacaggtgatattgacgatcgcttccacatcatttaaacgatttttggggctctgaggtggaattcttccctcgaccgatggataagtcttagtccgccgaagggggcttagccggacaggaatcgctaatcttaatgaatttgtcgttatagaccagatagtgattccccggctgacgtaactcaggctgatgaaccacgtctcccggacgtagataccaggcatcgccttcctcttcggtcgaatcacatcctggcttaatcagtagcttaaaccatgtgttgccagtgttacttaccgttcctgtcaccttgtcgaaggaccatttaaactgaacctgacgtggtcgtactaccagaatggtatccatcaccaccaccggctccgtgctgaccacgccgccggttgggctgcgtcttgtatggttacgagtggggacctcgcgaaatgagacccggtagtagcgctcgcggttatcccgtggaccatgatagtaaaatttaaaatactcgctctcaccagcctgcaacgccagctggcggggggcgaaaagcagttcaccatccaccggtcgggtgcgcaattcactgctgcccgggctatcaatagcactgatggcaatacggtatatccgtgcgcttttgttgttattcactacacgtttgctgacaaagtcagtctcggacggcagcgaaaatgtcagattgccgaccgaaatcgcctgtgtcaaaggtgccgccagcatacagaccgctgtcagcagggccttagttaatgttacgccacgtcgcctgaacatgaatctctcctgaagcgctgacttcgccaaaccagccgttatcatctaccgtacgcagcgaaatggcgttatccattggaatcgaaaatttgactgtggtcttatccatctgccccacttcgccagagatatcagtccacggtgtggtcaaccacagcgcatcggtcatatcccgccagctatcatcgcacccggcatcgtaggtttttgtagctccgttgcgggtaataaaggaaagtgtcgccgggaacggtactttcgccttaccgtcatcggagctgaagacacaataggagcgcccgccaatcacctgcgcgggtccggtcaccttgatcagcacttcgtcggcagctgttttaccgctggtggttacgatatagccgaaatcgagtgccgactcgccgctgccaacatatccctcccgcgacggtgtctgagtatattcatcggagataatactgatgctgaaatcacggggtttgataatcagcgtgttggaggtagaaaattcataccagccagactccggtgatgtggtgttctgaaagcgaaagttgaatagatctttggtgttgatatcgctgatcccgaggttcaccatctgcttaaagaagttgctcgagaagaaaacatagatcgagtctgcgctcttcatctcgttgaaggtgtagtaataggcggtattgctcaccggtttccatgaactgccattcagactgaactgcatatcgtacgccccgacggccgaggctaacgacgagttggcgatcgccgggaatatatggattgaggtgttgctgagtccgtttgtttgcagggtatagttaaccatcttacaacttaatcctgaacggctgccgatggtttgcgtccggcagtcggcgttcccttcgcccagagtcggtactccgtcgctgttgataaatacttccgccagcgagtgggtatttatcaaccgtagatttgctgctttcgtatgggtgacgttgcgaacataccagttgccggaggcctgatccttacagcgtgcgccgctgctggcgtcatagttcacagaggtctggcaggcattgatggtcattgtaaagctgctgccgacgggcatttgttgcatatactggtaaaacgcgtctgacaacatgccgtgcatccacttcgcaccgccgctggtcaccgtcgcgccataaaatccactggcgtcggtggtttgcggcaggataagactggtggtcatattacacccagcgtaccagttgatgcagcgcaagccagttaaaggagatgaaactggtgaattttccagccacatatcaaacttccagttggtataaaggccggtgttgtaaccgttatcaatgtagccgaggctttgctgatagatggttcctgaaccagtgtattttaaaccggtccagcggttggcaccggtcaggcgcggatccagcgccccgccaggagtgacgaaaaagttgtcgtctgagttgttttcgacaaacacaaactcgcgtgccggtgcatccgcccaggttgttttgctcactgccgctctgagcgcagttactggccagattagcgcgaaaattatcatcgttattagtaggttaactctcattctcttctcctgtctgcgtcaccgccgcccacgatgagaggccgctgcagaccacatcaccgacccagacggcaccgcgcgcctggttgagttccagagccacttcgcaggttttattgccactgtagcgaaaatcgatagtggggtatttcttatccacgtccatgacaaactcgccgttttcatcggttcgggttcggccgatatggttgttaatccgtgcgttagccagcagtgtgccgtcttccgcacggatacgaccggagacggtaaccatctgcttcacctctggctcaatgacagcgacattgcctggatagagagtcagacgacttttgcggccgctgacgatatcgtaactgtcgagtgagtttttgctgttctgtaactccacctcatatcttccatagggagagagcgggagatagttacgcttgccgttaagcgggaaaatccgcccgttgattttggcgctgatctgaccgtcgtcctccagcccggtgttgaatatcaccccagcgttgccatcagtccgcccgctggcagcaatgtttttaccctgccagccgacactgccattggcggtcaagttggtattgacgtagccgtccgccgcgctattgacgttcagcgttccgctggcgtaacgagcgtcgaattgtgcatacgccccgccgctgagggttttgtcatcaccggtatcgccggagatggcacgtgacagattggcaccaacagtgcgaatggttccttcatcaaactgtttgcgtgctgacaggtttgccatggtgtagccgttttgatgagtcatccctgcgctaaaccagttgcccagtggtagcgagagatcgagagcgatatattttcctgtattggcgttgctgtcgccgttgttatagcgctgaataccggcccgcaggccaagcgaaccaaaggtaccgctgtagacattttgatagtaatctgccgtgtaataatggctgttgtaacggcggtcatcattgtagctgatgctgaatgtgcccagcttcgaccacagtgagttcaggttgagtgtgccgccgattgcacggttgtcggcatcgctacgtcgcaattgattgccaatgcgggttttttcctgattaacccacagcgaactaaagcctcccggtagagtggcgctgatgctgccgatgctgctccatgagctgtcactggccagcatattttgcagtttaacgttgatcgcccccccaagcggcagcgtcagacgggtttcacccaccgcctgattatcgtatccatatcccgttgccgcccagctaagcgtactcaatgagccggaggtcgaggcacctgctagccaactctctttagctggtcgcgtctttttcccgttttccgaccagcgatccatatgaaagctaccgccccatacctgccacgccagtggtgcaccgacgccgcgcccccggctaaacagcttattgacccgctgggtgcgtttgctgatcacgcgaccgttaacgatcacctcaacttccacatcgtaaatcccgtacggtagaccccgggtatccacttcatgattgcccatagtgaagttctgaacgcttagtagccgcccatcacgggtgagatgtacttcgcccgccgccggtaaaaaggcgatcactggcgtggctgactggctgctgtcgaagatggtggagctggcctggtttccccaggaaaggccgtaaatcttccctgctgaaatggcggtcatcggccctaaggactgcaagttccaggtgtcgagcattccaccggcaaatcggtgaccggcaaaatcgcgttcatacatcgctttatataattcactgtcctgttgaccgctaccgatcccgtacagcgagccgtcgagcaccacatgatgttcgcgcagtgcagtaacgttattcagcgacagatagctggatgtgttgctcccgccgttacgcaactggttgttatagacgcccaagttatagctcagattactgctgagggtgttaacactggactgcccgatgtcttcgctacgtgagcgtagtacggtgcccagcgcttcgcgcttgaccactagctgcagcagcagttggcgcaagctgagatccagctgcgcgttgtcagtcagggggatggtaagggcctcattgaacggggcgttggccagagccatcagctgctgtcgagtttgttcgctgacactggcgttatcttcactctcttccagctgtattttccggatgcgtagctgtccatcgtccagccagataaaagcgctgccgattcgctgatcgtcctggcgaccctggctaccggcgagatgaatatagagcgggacgctcatgccgtcctgaagcgcctgactgaaggcctgcggaataatcaccccacctatttgctgcgcacttatgtcagcagcgctggcatcgggctgaacgaacaaaaagaccatgccgaaggcaaactgggctttcagtcctggggagaaccgtcgtaaaggcattgtcgttatccatctgcacagctatctatttcacgggaatgaacttatcaccctgccaaagtgcaacccgtcctttgttatccgcagtgtccacgcgggtaaaacgacgcgacttgcccggcatcaggtagtaattctctttacactccttaccgttggcggctttcaggcaaggtccgtaggcgaggatccgcagcgtcgcatttcctgtatttgtcagggagccgttggcgtactgaaagtggtagttcgcctgacgaggggcgacgaccagaatggtgccgatgcgggcggaagcagtggccacagcgctgcggttggcattatcgcgctgcgcatcactgagggcctgatcaaaccagacaatgcggtagtagcgctctttttcatctgcgggtcccttatagaagaagcggatcacttcgctggcttgggcgggtagcagcaagctggcgggagtgagtagcaactcatccggcttgtccattgagataacctgcccgtcgtcaagcggtgaagagagccgttcgagacggatattgataaggcgaccactgtcggtactgtttttgatcgttttgctcagcgtgctgctgtcactgttcataaacgatgatatatcgccgacatccagcgcctgggccggagatattccggaaaacagcagagcgagaggcagaaggtgctttttcataacaattccgtccaggaataaagcaggggggctacccctgctggtacatcagagagattaactggtccaggtcgcgtcgaactgtacgctaacgtcgccgctccagatgccttccggtagagtgctgtaatctgttactgcggtggtaccattggtggtaccgctgatgatggagaaggtgaaaccatcctgtgcggtggtacgattgctggcattgtaaccgttagccagcgggctaaggttgccgcccagtacgccgttggcggtatcgatcatcacggtatcgccagttttttcgactgccgcgccgttataatccacgcccacattcagtgtggaacctgaggtatccaactgggttaatgtgttggtgataagacgtgaggtcagtttaaaggcggtagccgttgagtcaccctcgatagccacgtcaaatagacctttctgtgagttaaaacctttaatgccttcggcatactggaacgccaggctaccgagtggcgtcacaaccagcttactggtggtgtcttttttggctgttgccgaccaggtcgctacagcctgagctgttacgtcagcagcctgcgccacacccatgccggtaaacaccgttaccagagctattgccagaaccttttttttcattgcatttcttcccgagttgaattgaggacgtgatgtcccagtgagtcattttttaaaactaacttgcctggagtttactgaaccaacttatatatttttgagtacagcttgtcctcagcattacgccgatgggtatacactgtcttcacactacaattttcaattctggcaatcgatttaggttgcattccctgggccgtcatgcggatgatttccatttcccggtccgtgattttatctttcttaatatcttttctcaggaacctgccattaatcacatagaccagttcttttctaatatcacgactcagtccagcgtataccacgcccctaatattgctattgtaataccaataatttgctaaggcctctgactttctggccgcaatcaatacgacctgtttcccctttaccgcggataaccattcattatcacggtttataaattcagataaagaatccgtactgagattgataaacacgaaatcttttctaattttctccaacgatagataaattaatctgtcgatatccacaatcagttcagatagtcctttatagaagtaggcgtcatggggagaccagatgtatttatcagaacggttttgacattccatatggtttttaacctcatagtccctactgtaatcactttgccatgtcactactttccaaacctgtaatttttacaggtgcattcagtttccttagtaaaccggaagtaaataagatacgtagtacatatcaataaaggttaaacgagattaagtttaattattttcgattgggcttaaatttatgttttttttcccgatgagtgtcaatatgtgaacggaaaaggaattcaatggttaagtcaatatttagaaaaactgaaaatattgcttttttgataagaagaaaaagacatttggtttcataaggttattggcaatataacgttcaattcttacttgcattttatattggtcaggaactttgccctgaagtgttaggaatagtcttaatgcgctgtgtgatggactagtaaaaaaacaagttttaagggtaagggatagaatataaaactatgatgagctgtcattgaagatgatttgccaatcagtaagatattttaatggattaacatgccgcacaaaatggttacaggtgttcattccaataagtaatggaaaattgaacgggcgtatgtacgtcatctgttcggtaagcccccaagagccagattaagtgaagttaaacgaaggctgccagctgtcacaggaacgatggcctttttgtcagggcactgcattcagttatctgtgcgcgttactctaactggcactcgaacgtcggcgacggggttaccggtggatcagactgttcctgtggcgtaaacgtttttatgttagtaccaacagatttaccacatttatcatcttaacagtttgagtgaaaatgcaggctgcgccgcaaagggaggagactgagtggcgtgttcagtctaaaagagggttgatgccagcatacaggggcgaagctggtcaacaagtcaacattaagataatggaatattcggagagaaacgtcaggcagttggcctcaaatgaacaggaagaatatatccccaggaaaattaatgttggtgttataaacacaccaacattaatccgatctgattattaatcagacaaatatcgttaatccgtcgaattttgaatcaacgttttttcttacgaccctgaacggccttaaaacgtggattagatttacaaatcacatatagccgtccttttcgcttcacaatctgacagtctggatggcgttcttttgcggtacgcagagagttaagaactttcatcacgccccctttttcgtgctaacaaaacgaccaaaacgttgggtgaatcgtgcaacatttccttctgatgccactgttctcagcttccctgtatagaacgggtgcgatttagaagagacatcaattgtcacgtatggatacgttacgccatccagctcaatctcacggtctgttttgatagtcgagccgattttaaagtactcatcaacactggtgtcgtggaacaccacagtacgatactcaggatggatattgggcttcatcatttttacctgttatgttataacataaccataaagatacatgctcatccggatcatttcaacactcaatccctgtgactctttgtggatgtggaattttcgcaacggggaactctggcattgttagcagccattggtgacgctcccataaacgcctggatgagtgattgatgatggttttgctgagagtatggatttttcgagaatggaggttatctccactttactggccgataatttatcgcagtatgattgattacctgacagcgtgtattcctctcccacggatataataattacttacaaaaaagggagaggatgcatattttaaatatcactgaagtgaacagtttatttccgttattaatagaaatggagaaataaataggcgtattctacaattgcgacaaaaacaacgatattaatcagtttatgactgatttgctgtactttattctctttcattggtacttcctcgctttaaaaaagagtgcacttcgtaagtgcccttatataaataacgagtttggtcaaccaattttttgacatgtatcacaaatttgaatagatgtattacatcaactatattttattgcaccaacgtcattgatatatgtcgcctgaagtcagttccgggaatgagtctgatctcaagactggcccagtccgggcgttgattggtgctgaggagcatatcgcatctcatcataatgtcgtatctcctggggtgttatacaagatatcgttgttggtgacctgggagaggaattgagttctattaaaccgtcaactatgccggatacatactggattacactgcaggcacgccttatgagagaacgtgccgcagtgacgggttaattatctgaaagaatttgtgaggctgtatcggttactcattgatttgatagttttactctcgggagaataatagatatttaatccattaacggaaaccagccagttcctttcgatgcctgaatttgatcccatagtttatccggaatggttaattcatgaacaagttgtgttatcgttcatgagaagcataacgtaaagggaaaagctcgattagacggcagaatttgtcaggggttatgaacgaaattcataaatctgtttgagtgttgcgatgggtagtgcaagttagatatctccgcaatttacagtccgatgaaggaaaatgaatatccataaaaaatatattggtttatcctggcatatatacctatttcgacgtatttccaatagttttaattaaaggcaggtcattgttattcactctgaatagtgaattattcactgtccgcagagtaagaaatataacttaggtatctatttaatgacttgcacaaaaagctaaattttcccccataaataaaaatataatcccgcgcccaaccacctgatgagtggctataggcactggatatattaggtggcggtgcactttcttacataaaggtatttccttttctgcggaaaaggaaatcgggaaatccccggtttttctgacaagcagacgccattatttgtgtctgcctatgttcgttaattcgttcatcaggaaattatctcaatgtcacattataaaacaggtcataaacaaccacgatttcgttattcagttctggcccgctgcgtggcgtgggcaaatatctctgttcaggttctttttccactcgctgtcacctttaccccagtaatggcggcacgtgcgcagcatgcggttcagccacggttgagcatgggaaatactacggtaactgctgataataacgtggagaaaaatgtcgcgtcgtttgccgcaaatgccgggacatttttaagcagtcagccagatagcgatgcgacacgtaactttattaccggaatggccacagctaaagctaaccaggaaatacaggagtggctcgggaaatatggtactgcgcgcgtcaaactgaatgtcgataaagatttctcgctgaaggattcttcgctggaaatgctttatccgatttatgatacgccgacaaatatgttgttcactcagggggcaatacatcgtacagacgatcgtactcagtcaaatattggttttggctggcgtcatttttcaggaaatgactggatggcgggggtgaatacttttatcgatcatgatttatcccgtagtcatacccgcattggtgttggtgcggaatactggcgcgattatctgaaactgagcgccaatggttatattcgggcttctggctggaaaaaatcgccggatattgaggattatcaggaacgcccggcgaatggctgggatattcgtgctgagggctatttacccgcctggccgcagcttggcgcaagcctgatgtatgaacagtattatggcgatgaagtcgggctgtttggtaaagataagcgccagaaagacccgcatgctatttctgccgaggtgacctatacgccagtgcctcttctgacactgagcgccgggcataagcagggcaagagtggtgagaatgacactcgctttggcctggaagttaattatcggattggcgaacctctggcgaaacaactcgatacagacagcattcgcgagcgtcgggtactggcaggcagccgctatgacctggttgagcgtaataacaacatcgttcttgagtaccgcaaatctgaagtgatccgtattgctctgcctgaacgtattgaaggtaagggtggtcagacactttccctggggcttgtggtcagcaaagcaactcacggactgaaaaatgtgcagtgggaagcgccgtcattactggctgagggtggcaaaattaccggtcagggtagtcagtggcaagtaacgctcccggcttatcgtccaggcaaagacaattattatgcgatttctgcggttgcctacgataacaaaggcaatgcctcaaaacgcgtgcagacagaggtggtcattaccggagcaggtatgagcgccgatcgcacggcgttaacgcttgacggtcagagccgtattcaaatgcttgctaacggtaatgagcaaagaccgctggtgctgtctctgcgcgacgccgaggggcagccagtcacgggcatgaaagatcagatcaagactgaactagccttcaaaccggctggaaatattgtgactcgttccctgaaggccactaaatcacaggcaaagccaacactgggtgagttcaccgaaactgaagcaggggtgtatcagtctgtctttactaccggaacgcagtcaggtgaggcaacgattactgttagcgttgatggcatgagcaaaaccgtcactgcagaactgcgggccacgatgatggatgtggcaaactccaccctgagcgctaacgagccgtcaggtgatgtggttgctgatggtcagcaagcctatacgttgacgttgactgcggtggactccgagggtaatccggtgacgggagaagccagccgcttgcgatttgttccgcaagacattaatggtgtaaccgttggtgccatttcggaaataaaaccaggcgtttacagcgccacggtttcttcgacccgtgccggaaacgttgttgtgcgtgctttcagcgagcagtatcagctgggcacattacaacaaacgctgaagtttgttgccggtccgcttgatgcagcacattcgtccatcaccctgaatcctgataaaccggtggttggcggtacagttacggcaatctggacggcaaaagatgcctatgacaaccctgtgaccagcctcacgccggaagcgccgtcattagcgggtgccgctgctgtaggttctacggcatctggctggacaaataatggtgatgggacgtggactgcgcagattactctcggctctacggcgggtgaattagaagttatgccgaagctaaatggacaggatgcggcagcaaatgcggcaaaagtaaccgtggtggctgatgcgttatcttcaaaccagtcgaaagtctctgtcgcagaagatcacgtaaaagccggcgaaagcacaaccgtgacgcttattgcaaaagatgcacatggcaacactatcagtggtctttcgttgtcggcaagtttgacggggaccgcctctgaaggggcgaccgtttccagttggaccgaaaaaggtgactgttcctatgttgctacgttaactacaggcggaaagacgggcgagcttcgtgtcatgccgctcttcaacggccagccagcagccaccgaagccgcgcagttgacggtcatcgccggagagatgtcatcagcgaactctacgcttgttgcggacaataaggctccgaccgtcaaaatgacgacggaactcaccttcaccgtgaaggatgcgtacgggaacccggtcaccgggctgaagccagatgcaccagtgtttagcggtgccgccagcacggggagtgagcgtccttcagcaggaaactggacagagaaaggtaatggggtctacgtggcgaccttaacgctgggatctgccgcgggtcagttgtctgtgatgccgcgagtgaacggccaaaatgccgttgctcagccactggtgctgaacgttgcaggtgacgcatctaaggctgagattcgtgatatgacagtgaaggttaataaccaactggctaatggacagtctgctaaccagataaccctgaccgtcgtggacagctatggtaacccgttgcaggggcaagaagttacgctgactttaccgcagggtgtgaccagcaagacggggaatacagtaacaaccaatgcggcagggaaagtggacattgagcttatgtcaacggttgcgggggaacacagcatcacggcctcagtgaataatgctcagaagacggttacggtgaaattcaaggcggatttcagtaccggtcaggcgaccctggaggttgatggcagcacgccaaaagtggcaaacgacaatgatgcctttacgctgacggcaacggttaaggatcaatacggcaaccttctgcctggcgctgtggtcgtctttaatctgcctcggggcgtcaaaccgcttgcagacggtaatatcatggtgaacgccgacaaggagggtaaagcggaactgaaagtggtctccgtgactgccggaacgtatgagatcacggcgtcggcaggaaatgaccagccttcgaatgcgcagtctgtaacgtttgtggccgataagactacggcgaccatctccagtattgaggtgattggcaaccgtgcagtggcggatggcaaaaccaaacagacgtataaagttacggtgactgatgccaataacaacctgttgaaggatagcgacgtgacgctgactgccagctcggaaaatttagttctggatcctaaagggacggcgaaaactaatgagcaaggacaggctgttttcaccggctctaccactatcgcagcgacatatacactcacggcgaaagtggaacaggccaacggtcaggtatcgacgaaaactgctgaatctaaattcgtcgcggatgataaaaacgcggtgctcgccgcatctccagaacgtgtagattctctggtggcggacgggaagactactgcaacaatgacggttaccctgatggcgggagtcaatcccgtaggaggaagtatgtgggtcgacattgaggctccggaaggagtgacggagaaggattatcaattcctgccgtcgaaggctgaccatttctcaggtgggaaaatcacgcgtacatttagtaccagcaagccaggtgtctatacgttcacattcaacgcactgacgtatggcgggtacgaaatgacgcctgtgaaggtgacaattaacgccgttgctgcagagactgaaaatggcgaggaggagatgccataatttgaatagtatgaaagttacgatctaataaagaataatggtgttgaaatattcaacgccattattcactgaataccttgcctgatactgattaaatagtatcaggcaaggataaaactcaataagagatagtgaccaactaaaccggacgaacgggaataaaaatttcgcaaacaacatcattgccatccttttctacgaaatcttcattgtaataaaagcgctcaatatcgctgccgttcactctggctaaccccctggcaggtaactctatcagatagatgttacgcacccagtcaggataattttcccagtttccttcataacggaaagaggcataaagtcctcgggtcgttgtccactcttttggcatgtcagcatattcacataccgtaccagcaaaagtttcaaccgtgagcaaatcgaccgattttgttgacggttcaaacgtggaaacgaaatagatatccgtcttaaaattcttcatacatctggctaaatgatgacgtcgtagtttgacttcttcatccggtgatttattcgacacttcaatgtcatatttaaatgagttgccaaaaataggtgtctcaggaaagttgattaatctacactccgtcttttgctgttgacgtattaaaaaagaagggaagatatttgcgagatcccaataatcacggtggcggtattcacggggagagcagccgaataactttttaaattcgcggctgaatgactgctgtgaatcaaaatgcaaagagagtgcaatatcaagcatagatttcgcggtgagccggacaagaatggcggcacgacaaagccttcgtttgcgaatgtattctcccaaaggcacatgcatgaaatttcggaacagaagctggatgttgcgtctgctgtagccagatttctgtgcgatatcttcgattgaaatagggtgctcaagattgcactcaatccactccaggagctgctgtagaatcttctgcctgatcatctcattctccgttaattctttgtcatatcgcacattttcgttataccctgggccctaagtgtatcaaaaatagcaagggcgaaggcaaaagcactggtagcgtctgcttcgttgtccccgaaaatagagaggtttcagtcctacattattaatgaattttttgcataagtgatatcaaaatccacatactactttgaggttacgttttaacgtagactcattgttcatgcctaatggagggactgacagtggaattttccgtatagtctgcttcagagtattgcagatgcccatcaaaaatcgatttctcactgacagataaagaaatggcacaaattagttcgcttgatttgggttatgttggggagtcggtaaaacattttaatcctgaatttgttcgtggttgtcttgctgtaaaaatacatgattgatattaatcatgtattttacctaagacgacaaaaaccttttaacagggagtgatattgatcttcactctgtcatatctccggtaatatggcgtcaggcttcatcatcagaaagggggcctgacgcctgaaaaagtgaacaacagacagtgttcggattatcaatattcagtttttaacgttgaactggattcattactgcgttgtttaagaatttcccgcgccgaatctgccattatcatgactgcacctgccagcatcagagtatctttcaataccaggcgaccagcaccggataaataagggaaaccatgatgagcgtcacccaatgcgggtacccatgcctccggggtggtgattaaaaatgagagtgttaccagcggcgtggtaaatgccatcagtcctcccaataaacctaaccagcgattgacaggattagccaaaaccagcagagcaataatcacctccacgacgccaagaccgttggaaaaaccataggtattattggccgtttgccatgcccttgcttctggtttgtattcgccttcgtgagtcagatactgtttatagtcttccgggtgttcataaaagaacgacattagtggactgtttgcgacgaatggtgtaatgctgtctgcctcgtaagggacaaactttaataacccaatccacataaaaacaattgcaatactcagacgaatcaatgtcaggccaattttatctccccgacttaacaggtgcaggtatttttccattgtgaacatccttatttatacaatactgctgttgcggttgaattattatcaattcgcatcgatgtgactttccaggatgaagcattatattttctggctatatcagcaatggtatcctccagaactgtcggtgatgctgatactgacgagacgctgatatgtttcagaattattttatcatctgcattggtggaaaatgccataacgccagataatagtgttgcaaataaaacagattttttaaacatataaaataccatcaatgaagtgattaagaagttatagagtaacagagaattaataagattcttttctctgagacgccagaatatttgttctggcgtctgattttgagtttatttgactaatgaaaatagatcattgagtgattcgctcatcgacggatgagtaaatatctgatcgcgtaatatgctataaggcagcccggcatccatcaccattttcactatattgatcatctcgtgggagtcaacacacagcagtgatgcccctaacatacgttgggttttattatcaacaatcgcttttaataccccacgagtatcattcatcactctggcacgcggaattgcagctacaggcaatgtcaccacctgaatatcagcaccactctctctggcttgttcttctgtcataccaaccctggacaggggcggtgtcataaatacggaataaggcacatttttccgatcatcagtactacgtttgccttcacccagtaactcatcacgtacaatgcggtaatcatccagtgatatgtaagtaaattgcagcccgccggtaacatctcccatcgcccaaatattgtctgcggtggtatgtaatcgcttgtcaacgacaattgccccgcgctcgtttactgcgataccggcattttctggatgtaacgaagcggtagccggttgacgaccggaagctattaacagtgcatccaccgccagttgggcgtgctcgctatgcacttgcacttgattttcatggtgactgattcgctccacatgggcattgaggataatatcgacgccctgatcgcgtaaaatcgtcgcgatattatcagcaatatcccgatcttcccgaggcaaaaacagcgaagctgcttctaaaatggttaccttgctgccaaaattagcgaacatagaggcgaactcaacgccaatatatccgccgcccaaaatacctaaatgcccaggcaattcttttagattaagtaatccggtgctgtcatatactcctggcgtggtggtaattccaggaattggcggaaccacggtttgtgcaccggtattaataaaaattttctcgccatgaatttccagatttccctcaggccgatgaacacgcaggctatgattattgataaactccgcctggccgtcgatcacgtcgatattgggcatatccgcaagattatgaaaattcttattacgtaaaaaattaaccacttcatttttacgctgtatggcacggacaaaatctgtgtgctgctgtgcgtcatgaaccaatgttttggttgggatgcagccgatattaatacaggtcccgccatacattgcatttgattgttcgatgagagccactcgccaacctgcttttgccagcgtgacggctaatgtttttccagccttgccaaaaccaataatcactgcctgatatttattcatgatgatttcctgtcgaaacgcgttcatttgacatcatgactatagacgcaaaagagcaaataacatttcttcacaacgcttgatattttgtcttatcgtctgatattttctttttcttaatcagaatcacaaaacaaaaatcatgattaactatttgatggtattagattagttatttactaagattgttggtgtttgtaatcaaaaaccactcaggagtctgatatggatgcccttagccgtttgttgatgcttaacgctccacaaggaacgatcgataagaattgcgtgttaggaagtgactggcagcttccacatggtgccggggaattatcggttattcgttggcatgcgttaacgcaaggagcggcgaagctggaaatgccgacgggggagatttttacattacgcccgggaaatgtggtcctgctaccacaaaattcagctcatcgcctgagtcatgtcgataatgaatcgacctgtattgtctgcggcactcttcggttgcaacattcggcgcgttattttttaacgtctttgccggaaacgctgtttttagcaccggttaaccacagcgtggaatataactggctgagggaggcgatcccgtttttacaacaggaatccagatcggcaatgccgggagtggatgcactgtgtagccagatctgcgctacattctttaccctcgcggtgcgtgagtggattgcacaggttaatactgagaaaaacattctcagtttgcttctgcatccacgtcttggtgcggtaatacagcaaatgctggaaatgccaggacacgcctggaccgtcgaatcgctggccagcatcgctcacatgtcccgggcaagttttgcccagcttttccgtgatgtttccggaaccacgccgctggctgtattaacaaagttgcgtctacaaatagcggcccagatgttttcccgggaaacgctccctgttgtggtgatcgctgagtcagtaggctatgccagtgaatcatcttttcacaaggcgtttgtccgcgagtttggttgtaccccgggagaatatcgggaaagggtcagacagcttgcaccctgaataaaaccgccagaaatcagggcaaagataatccgcattccgggagttgtgagcctttcaactatttctatttccaacggtggtttgggctttatatattttttctgatggactctagctcagtttttaaataaaaatgcaaactaaattgcttcaattaaataaaatcccgactattacttgatacgtgattattgtcggtgatttttttgtacaccatcagtgtatatctcaataacccctgaataagtagctctgaataggtataagggatgtagccatttttaaatggatttcttatgccaaaaatgatcgtcgatttccccataaaatgtgagcgatgccgaaagaaataaaattagttattgcatttgacgtttggatgaaagattatcatttgtcatacaaatgaggggtggtatgttgctagccaattaaaaaagaacgccatatttattgatgattgatcccccggtgggggggaaacatcgggcataaatgggcatgaagtaatggagtattagttgtgaatgtcaatttctttgtcacctgtattggtgacgccctgaaatcaagaatggcacgagactccgtgctgctactggaaaaactcggctgtcgcgtaaatttcccggagaaacagggatgctgcggtcagcctgcgatcaatagcggttatatcaaagaagcgattccagggatgaaaaatctgatcgccgcactggaggataacgacgatcccattatttcaccggctggctcttgcacctatgccgtaaaaagttacccgacgtatctggcggatgaacctgaatgggcatcacgtgccgcaaaggttgccgcgcgtatgcaggatctcacctcttttattgttaataaattaggggtagtcgatgtaggtgccagtttgcaagggagagcggtgtatcacccatcttgtagcctggcccgtaagctgggagtgaaggacgagccacttacgctgctgaaaaatgtgcgtggactggagctgttgacctttgctgaacaggatacctgctgcggatttggcggcacgttctcggtcaaaatggccgaaatatccggcgagatggtgaaagaaaaggttgcgcacctgatggaagtccgccctgagtatttaattggtgctgacgtgagttgcctgctaaacatcagtgggcgattacaacgggaagggcagaaagtcaaagtgatgcatattgctgaagtgttgatgagccgctgaggatataaagatgtcgatcaaaaccagtaatacagattttaagacacgcatccgtcagcaaattgaagatccgatcatgcgcaaagcggtggcaaacgcgcagcagcgtattggggcaaatcggcaaaaaatggtcgatgaattggggcactgggaggagtggcgcgatcgggccgcccagatacgtgatcatgttctgagtaatctcgacgcttatctgtaccagctctcagaaaaagtgacgcaaaacggcggtcacgtctattttgcaagaaccaaagaagacgctacccgctacattttacaggttgcccaacgcaaaaatgcccggaaggtggtgaaatctaaatcgatggtgaccgaagagattggtgtcaatcatgtgttgcaggatgctggcattcaggtgattgaaaccgatctgggtgaatatattctccagctggatcaagatccgccatctcatgttgtggtcccggcaattcataaagatcgccatcagatccgtcgagtgctacacgaacgtctgggctatgaggggccggaaacgcctgaagcgatgaccttattcatccggcaaaaaatccgcgaagatttcctcagtgctgaaataggtattaccggctgtaatttcgcggtggcagagaccggttcggtatgcctggtgaccaatgaaggtaatgcgcgaatgtgtaccacgctgcctaaaacgcatattgcagtgatgggaatggagcgtattgcccccacgtttgccgaggtagatgtattgatcaccatgctggcgcgcagtgccgttggtgcacgtttgacgggatacaacacctggctgacaggaccgcgcgaagctgggcacgttgatggtcctgaagagtttcatctggttattgtcgataacgggcgttctgaggtgctggcctctgaatttcgggatgtgctgcgctgtattcgctgcggggcttgtatgaatacttgtccggcatatcgccatattggcggtcatggatatggctctatttatccagggccaattggtgcggtgatttctccgctacttggcggctataaagattttaaagatttaccctacgcctgctctttatgcacagcttgtgacaacgtgtgtccggtgcgtattccgctgtcaaaactgattttgcgtcatcgtcgggtgatggctgaaaaagggatcaccgcaaaagcagagcaacgggcgataaaaatgttcgcttatgccaatagtcatccaggattgtggaaagtcgggatgatggccggtgctcatgcggcaagctggtttatcaatggcggcaaaacaccactcaaatttggcgcgattagcgactggatggaagcacgcgatcttcctgaagctgacggagagagtttccgtagttggtttaagaaacatcaggcgcaggagaaaaagaatggataatcgaggcgaatttttgaataacgttgctcaggcactgggtcgcccgctgcgacttgaaccgcaagcagaagatgcgccgcttaacaactatgctaacgagcggcttacccaacttaaccaacagcagcgctgtgacgcgtttattcagtttgccagcgatgttatgttgacgcgctgtgagctgaccagcgaggcgaaggcggcagaagctgcaatacgtctgtgtaaagagctgggagatcagtcggtcgtgattagcggtgacacgaggctggaggaattggggattagcgaacgtttgcagcaggaatgcaatgccgttgtttgggatccggcgaaaggtgccgagaatatctcgcaggcagagcaggctaaagtgggtgttgtgtatgctgaatatggtttaaccgaatcgggaggcgtggttcttttttccgccgccgagcgcgggcgttcattgagcctgctcccggaatattctctttttatcctgcgtaaaagcactatcctgccgcgtgtagcgcaactcgcagaaaaattgcatcagaaagcgcaggccggtgaacgaatgccttcctgcattaacatcattagcggccccagttcaacggcggatattgagcttatcaaagtcgtcggagttcatggcccggtgaaagcggtgtatctgattattgaggattgttgagagagatatgaagtctggacataaacctgaagaaggcatacgaggttgaaaatagcgtttaggacaacctgacttaaccccgttccgtcatggttatgctgctcttctgtaaatatcctggtattaccaatgccaggatatttacagtgaaaaagacaggcatccattcctgaaaacgggttcccttcccggtcattgtcacttcagctttatacaggcactctctatcagaatgttgtttattactgcccagagttttgttggtattcatctaccatttttttgacaaggcaaaacattacagaaattacaatgcttagaaataatcccagagccaggcaaatggcagcagggtatttattttttatttctggtgagcttatagttacacagccatcaccgttcggatacaatgaccagttcctggtcaggtatatcatttttgtataaagctcactgttaattgctgaaggcgtttgtatctcatcgagaacttgcctgccattatgatattctgacgcataccatttgataatagaggcctgcacgcgagatatttcctcttcagcagttggtaaagctctcttatctcctgaccattccagccttatttctctgttcttgacatctgggctggtgtgaaaaaatgtagtaattcgctgaataacatcttcagtcattgtagtctgacaggcaaaattattattgctatcacagctaacaagtatacctggcgttgtctggtttatttttaggctgtaaatcacttttatattgtctttattgatatacagaaacaacagcaccatagccatacatatagccataataaaaaggataacacgaatctttttcttcagataaaataaaatctcaatcagatcgatatcctgtttgatttgttcacgcataatatatccagagaataaaatctgtcgcagataaggttgtattaatagtctgtatcaggaatgttcgggttaaatatcagcaaaaagcccgcatcatgaatactggatatgaagcatgagagttacctcagtgtttatataaggattcggtccccctctctggaacggtaactctcaatctgatcggttcctgcgttagttcacatcacgactcattttttcgctctcaccggcatcccatttgccacaaaatatcccgccgtgctcctcggcagcgcttcctgtccacgaatcatatccgctattttctctccaatcataattgtcgtggcgttcaaattcccggtgataatctgcggcataatcgacgcatccaccacacgcaggccttctaacccgtgtacgcggccttcgccgtcaaccacggacatctcgtcgtaacccattttgcaggtaccgcacggatggaaggcggtttcggcgtggttacgcacgaactcatcgagctgttcatccgtctggcattcgacaccggggctgatttcgcggccacgatactgatccagcgcgggttgatgcatgatctcgcgggtgatgcgaattgcgtcgcggaactcctgccagtcctgctcgtgcgacatgtagttaaacagaatcgccggatgctggtgcgggtcgcgggatttaatccgcacatgcccacggcttggcgagcgcattgagccgacgtggcactggaaaccgtgctctttcactgcattcgagccgttatagttaatcgctactggcaggaaatggtactgaatattcggccacgcaaattcctcacggctgcgaataaatccacctgcttcaaagtggttgctggcaccaacgccagtgccgccaaacagccactccgcaccgattttcggctggttccaccactgcagggcagggtagagggaaaccggttctttgcactcatattgcagatacatctccagatgatcctgaagattttcgccgacgccgggtaattcatgcaccagcggaatatcaaactccgccagcagttcagcgttgccgacgccggagcgttgcaggatctgcggtgaggcaatcgcgcctgcacataacagcacttctttgttggccgttgcgcgggttgggatggtgctgtcgccttccagccattcgacgcccaccgcgcgtttgccgtcaaaaatgatgtgatcggtcatagcgtgagtacgaatggtcaggttaggacgcgatttggcctgatcgagatagccacgcgcggtgctggcgcgacggccctgcggcgtgacggtgcgatccatcggaccaaaaccttcctgctgataaccgttgagatcgtccgtgcgcgggtagcccgcctgcacgcccgcttcaatcatcgcttcaaacagcggattgacgccgggtttggaggtagtgacgctcaccgggccatcaccgccgtgatagtcgttttcacccatatcgcgagtctcggccttgcggtagtagggcaggcagtcgaggtagctccagttctccagaccgggttcttgcgcccagttatcgagatccagcgcattgccacggatgtagcacatgccgttgatcagcgacgatccacccagacctttaccgcgtccgcactccatgcggcggttattcataaacggttcaggttccgtttcataggcccagttgtagcgtttaccctgtagcgggaatgccagggcagcgggcatctgggtgcggaagtcaaagcgatagtccgggccgcccgcttcaagcagcagcacggaggtattcggatcttcagtcagacgggtagcgagaacgttgccggctgagccggcaccaataatgatgtagtcaaattgcaaataaacctcctggttagaatatggactggaatttagccatctcaacctggatggacttcacctgggtgtaactctggagcgtcatcacgccgttctcgcgaccaatgccggagtgtttgtagccgccaacgggcatctctgccggggattcgccccaggtgttgatccagcaaatacccgcttccagctgatgaatgacgcgatgcgcgcggttcaggtccgctgtcacgatgcccgccgccaggccgtagtcggtatcgttagcgcggcgaatgacttcgtcttccgactcgtaggtcagaatggacatcactggcccgaagatctcttcacgcacgatggtcatatcgtcgctgcaatcggtgaacactgtcggtgcaacccatgcgccgttatcgaagccatcgcctttcagtacatcgccgccgcacagtacgcgcgcgccttcctctttgcctttggcgatatagcgcagcacgttatcgcgatgcgggaagctgaccagcgggccgaagttagtttgcggatcgaaaacgtcgcccgcgcgaatgcgctcaacgcgcgccagaattttctgctcaaatgcggctttgcatttcgccggaacgaagacgcgggtgccattggtacacacctgaccggagctgaagaagtttgccatcatggcgatatcggcggcgagatcgagatccgcatcatcgaaaacgatcagcggtgatttaccgcccagttccatggtcacttctttcagggaagaggccgccgagttagccatcacttttttgccgctggcgacaccgccggtaaatgacactttggcaatgcccggatgctcggtcagatattgcccggtctccgcgcccacgcccggcaacacgttaaatacgccgtccggcaggcccgcttcgctgtaaatttcagccagctttaacgcggtaagcggggtaacttcgctcggtttgaaaatcattgcgttgcctgccgccagcgccggggcggatttccacagggcaatctggatcgggtagttccatgcgccaatccctgccactacgcccagcggttcgcggcgggtatacacaaaggacgtttcacgcaacgggatctggctgccttccagcgccgggatcagcccggcgtagtactccagcacgtccgcaccggtaacgatatcgacggttgaggtttccgaatatgcttttccggtgtcgagggtttccagttttgcgagttcgtcattgcgttcacgcagaatatcaacggcccgacgcagaatacgcgagcgctccatggcggtcatcgacgcccagattttttgcccctgctgggcgcttttcacggcgcgatcgacatcctcgcgcccggcggcctgcacggtcgccagcacgttaccgttggccgggttaatggtctcgaaggtgcgaccgctggtggcggaggtataaccaccatgtatataaagctgctgttctgccattcgggacatcacgtctcctcggttaatcggtgggtagatgctgagtgataaagtggcgggtcagggaattagcgcgggttttatccagcggtttgccgctcagagccgcgcgcagccataatccatcaatcagcgcggccaggccgtagcccgcttcctgtgcctgttcgcgcggcaattcgcgacgaaactcgctcaccagattcgacagcaagcggcggctgctgacctgctgtaaacgatagagcatcggctgatgcatactgctggcccagaacgccagccaggctttcatcgccgcactgctcacctgcgtttcatcgaagtttccgccaacaatcgcctgtaatcgctgctctgcactgccctgcggaagtgcatgtaatcgattcaaaaccgcgtcacgcagctgactggtgatatcgcgcatggttgcttccagcagaccatttttgtccctgaaatagtggctgatgatccccgtagaaacgcctgcacggcgggcgatctgcgcgatcgttgcatcgtgcatgcccacttcatttattgcttccagtgtggcgtcgatcagttgtctgcgccggatcgactgcatccccaatttgggcattttcgccactccattcatcagcggtgtttatctattaaagcggttattgattggacgttcaatataaaatgtgtcttaattgttacgaatttgattttaaatagtaacaataacagtggggatactggatgacagacctttcacacagcagggaaaaggacaaaatcaatccggtggtgttttacacctccgccggactgattttgttgttttccctgacaacgatcctgtttcgcgacttctcggccctgtggattggccgcacgctggactgggtttctaaaaccttcggttggtactatctgctggcggcaacgctctatattgtctttgtggtctgtatcgcttgttcgcgttttggttcggtgaagctcgggccagaacaatccaaaccggaattcagcctgctgagttgggcggcgatgctgtttgctgccgggatcggtatcgacctgatgttcttctccgtagccgaaccggtaacgcagtatatgcagccgccggaaggcgcgggacagacgattgaggccgcgcgtcaggcgatggtctggacgctgtttcactacggcttaaccggctggtcgatgtatgcgctgatgggcatggcgctcggatactttagctatcgttataatttgccgctcaccatccgctcggcgctgtacccgatcttcggtaaacggattaacgggccgataggtcactcagtggatattgcagcggtgatcggcactatcttcggtattgccactacgctcggtatcggtgtggtgcagcttaactatggcttgagcgtactgtttgatattcccgattcgatggcggcgaaagcggcactgatcgccttgtcggtgataatcgccacgatctctgtcacctccggtgtcgataagggcattcgcgtgttatcggagcttaatgtcgcgctggcgctgggattgatcctgttcgtattgtttatgggcgacacttcgttcctgcttaatgcactggtgctgaatgttggcgactatgtgaatcgctttatgggcatgacgctcaacagttttgccttcgaccgtccggttgagtggatgaataactggacgctcttcttctgggcatggtgggtggcatggtcgccgtttgtcggcttgttcctggcgcgtatctcgcgtgggcgtaccattcgccagttcgtgctgggcacgttgattattccgtttaccttcacgctgttatggctctcggtgttcggcaatagcgcgctgtatgaaatcatccacggcggcgcggcatttgccgaggaagcgatggtccatccggagcgcggcttctacagcctgctggcgcagtatccggcgtttacctttagcgcctccgtcgccaccattactggcctgctgttttatgtgacctcggcggactccggggcgctggtgctggggaatttcacctcgcagcttaaagatatcaacagcgacgcccccggctggctgcgcgtcttctggtcggtggcgattggcctgctgacgctcggcatgctgatgactaacgggatatccgcgctgcaaaacaccacggtgattatggggctgccgttcagctttgtgatcttcttcgtgatggcggggttgtataaatctctgaaggtagaagattaccgccgtgaaagtgccaaccgcgataccgcaccgcgaccgctggggcttcaggatcgcctgagctggaaaaaacgtctctcgcgcctgatgaattatccgggcacgcgttacactaaacagatgatggagacggtctgttacccggcaatggaagaagtggcgcaggagttgcggttgcgcggcgcgtacgtggagctaaaaagcctgccaccggaagagggacagcagttgggtcatctggatttgttggtgcatatgggcgaagagcaaaactttgtctatcagatttggccgcagcaatattcggtgccgggctttacctaccgcgcacgcagcggtaaatcgacctactaccggctggaaaccttcctgttagaaggcagccagggcaacgacctgatggactacagcaaagagcaggtgatcaccgatattcttgaccagtacgagcggcaccttaactttattcatctccatcgtgaagcgccgggccatagcgtgatgttcccggacgcgtgattgttattgcataaaaccgcgccatgtctgcatatggcgctgtttctcctacctcttgatacgttatatctatacggttaagcccttagtatctattgatgattaccagacaacagataataaaaaagaaaagaactattgcagcccaaaacctacatttgggctgttgcgaatgttcaataagtttagtcttatttaatgtaaatattgctgatcatttgaaatgacgcattattcatgagaaatgtgtatcgtaaatcaactgaaattaatgcaaccatttgttatttaaggtttaattatctgtgtgtgatattttattgaatgttttaaatattgtttttattggcattgctataatattggttatcatttgctgaatggattcagtcttaatgagtgggtttttaagggacaggcatagagtaatgatacgtatgcataaccaacatctttactcattatgtcattgaatgttgacgctatgtgtttatgagggagaggtattttcagttgatctggattgttaaattcatataatgcgcctttgctcatgaatggatgccagtatgtagtgggaaattataaatattgaaatagtccaactacttctttattaccaaaaatgagtatctgaattttaatattgcattcttgcgtgattatctcctgagtttgacttgtgattacctttttaaggtatttagcgtaactgtttttgagcgagcatcagaggtaaagataatcttcttgatagtgatgtgggatgttatacgtatggcatcgctgatgtttatggttaccccttatgtgtgctcaggaatcgacaggtaatcactcatactgaacagcgataaaagataaaggtgtgttcatgaattcatgtgattttcgtgtttttctgcaagagttcggtacaacggttcatttgtcattgcctggtagcgtatccgagaaagaacgactgctactcaagctgctgatgcagggaatgtctgtaacagaaatatcacagtacagaaatcgcagtgcaaagacaatttcacatcaaaagaaacagctctttgagaaactggggattcagagcgatattactttctggcgcgatattttctttcagtacaatccggagatcatatccgccacggggagtaatagtcacagatatattaatgataatcactatcaccatatcgtcacgcctgaagccatcagtctggcgttggaaaaccacgaattcaaaccgtggatccaaccggttttctgcgcgcagactggggtactgacgggctgtgaggtgcttgtccgctgggaacatccacaaacgggaattatcccaccggatcagtttattcctctggcggagtcatccggtcttattgtcataatgacccgccaactgatgaaacagactgcggatattctgatgccggtaaaacatttgctgccggacaatttccatattggcatcaacgtctcggcgggttgttttttggcagcgggatttgaaaaagagtgtctgaacctggttaataaattaggtaacgataaaatcaagctggttctcgagctaacggaacgtaaccctattccggtaacgccagaagccagagcgatatttgacagccttcatcagcacaacattacctttgcgctggatgactttggtacgggttatgcgacctatcgttacttgcaggcgttcccggtcgattttattaagatcgataagtcatttgtgcaaatggcgagtgtcgacgaaatctccggtcatattgtggacaatattgtcgaactagcgcgtaagcctggtctgagtatcgtggcggaaggggtagaaacccaggagcaggcggatttaatgatcggtaaaggcgttcactttttgcagggctatttgtactctccgccagtaccgggtaataaatttatctctgaatgggtaatgaaagcaggtggttgatgtaaaccgctattcacagcgcatcgggaggttggcagcgattaattctcccgatgcagtaaatcctgatagatccccgttaatatgccatttggcgcaaattgttttttaatccactgcgtcacctgacccgtagcagaatgctgagtcgccagtaacatgcgcgaatcctggcgcggattatggatttgtcgggtaaccagcagggattgcgtcatcgcctcacggaccatgtaatccggcaaaaaaccaattccttcacctaaaatctggcactgacatttggtgttgaaatctggcaccagaattgactcctgcccgtgcagcaaccagcccacttttttattaatcgtatgcgcggtgtcctccaccataatattagggtagagacgcagttggctttcggcgatgggttccggcacaaaggctaacgggtgatccggggcgatagcaaaagcccagcgaatcgcgccaatttcagtgtaatcaataccgccgccgtccagtagtgtatcgggtgcgccgatggcgatattggcctgattattaataatcgcatcccagacgccgttatacacttcggtggtgacggtaatctggcaggtaggaaactgctttttcagcacctgtaacaagcgtgcggtgtgtttgggcgtataaagcagctgattaatacaaatgcgcacacgcgcttctatgccctgcgaaatagtatcgatactgcgtttgatggcataaaaatcattcagcaggtcggtagctttgcggaaaaaataacgcccggactccgttaactcaatgctgcgggtactgcgagtgaacagcaccacatccagccccgtctccatacgcttaatggtgtagctaatggcggaagtggttaaacccaactcttctgcggctttactgaagctgccaaaacgcgcagcggtagtaaatgccaacagattctcttcggtaaaaattgagttcattaaaccattctcgccattatctactatgaatttctccagctatgactgtagaggtatcggttaaagatagataatcatttttgaataacttttaatacccgtcgcgtttagtcgtcgcttcgcttaatttttgtccaccatattctgaaattacccccacgcagttacccgccagaaaacccagtaacgtcaccgtccagttcatcccgctggcaaaaaacagcgtcatgccgagaaagccaccgggaataaaggacagtaaccagaaacgcccttgccagaccactaccgccgagaagggtacggtagtaattacgctcgcccagaacgcggacagtccacttacagaggccagccaaccagcagtcagcgcggcgaaaaacgcccacaccatcccggaataattaaccgccagacttctgataaaccccgatttaccgccgcctgcggcataaaaactgcaaaaggcgacgaagccaatggttcctaataattcccatccttgagagagcccgacatgtgaagacactaactgccaaagccctgcacaaataccgacggtgacacccgttgccgtgagtccgttcatcttgttcccctctggttagacatggacgaaagctactcttacatgtgcagactatagagaaataaaacctgattgagtgaaagggtatcgggtcaaagaaacaaatattgcactaccgcacactgcgaaaagattgttgaatattattcaacaaaaaggcgagatacggcgaattaaatttaagcgggttcttttatcagattatcgttgctattctcaattcatcgaaaacagccacaaaaaccaggggaatgtgaatgagtataaaaaatctacctgccgactatttattggctgcacaacagggtgatatcgataaagtaaaaacctgccttgcgctgggtgtcgatattaatacctgcgatcgtcaggggaaaacggcaattacgctggcaagtttatatcagcaatatgcttgcgttcaggcattaattgatgccggagcggatattaataagcaagatcatacctgtttaaatccttttttaattagctgtctgaacgatgatttaacgctactacgaattattttaccggctaaacccgatcttaattgcgtaacccgttttggcggtgtcggcctgacgcctgcctgtgaaaaaggccatttaagtattgtaaaagagcttttggcgcatacggagattaacgttaaccagaccaaccatgtaggctggacgccgctactggaagcgattgtgcttaatgatggtggtattaaacagcaggcgattgtgcagttattgctggaacacggtgccagcccgcatctgaccgataaatatggcaaaacgccactggaactggcgcgggaacggggctttgaagagattgcgcagttactgattgccgcaggtgcataaaccgggaggcttgctatcaacacaccagaaagacggtgtgtgtgggcgctaactgcggatgcggattttctggcgcagcgggggcaaggacaggttgaacaggtctttgccagagcggtaaatatcgcactcccggctcgccagcagttgctgacgctgctttgtgaagagtacgacaatgcgccaaacagttgtcggttggcactcactcactttgatgatctgttccggcatggtgataaggttcagtttgacgatcaaggtattacggttggtcaacatcttcatatagagatgagtcgttgtcggcgttggctgtccccaaccttgcaaatgaccgctgtgaattttcaccttatcgcctggctacagtggcacgacattattcatcagcacctgggggaaaatgaaaccctgtttaattatcgcggcgataatccgttttatcaggcgttaaataaagaattacatattaaacgacgggcagttattcaggccgtaaacgataaacaaaatatcgcctcagcggtcgccagtatgatggggttagggattggccttacgccatcagccgacgattatttaacaggtctggcgcttattttatttattcccgggcatccggcggaaaaatacaaagaggaattttatctcggtctgcaacgcggcaaaaataataccacattattaagtgccataacgctggaagccgcattacaacaacgctgccgggaaaatattcatcgttttattcacaacattatttatgacatccctgggaacgcaactcaggcaatagaaaaaattaaacatattggctccagttccggctgcgacatgctgtatggcatggccgatggttgtgcgctgagccaaacctacggagggaattatgtcagttaaaatagtcattaaaccgaatacctattttgattctgtctcgctgatgtctatctccacgcgtgcaaataaactcgacggcgtcgagcaggcatttgtggcgatggcgaccgaaatgaataaaggcgtgctgaagaatttaggactgctgacgccggagctggagcaggcgaaaaacggcgacctgatgattgtcatcaatggtaaatcgggtgcggacaacgagcagttgctggtggagattgaagaactgttcaacaccaaagcgcaaagcggctcgcacgaggcgcgttacgccactattggcagcgccaaaaagcatatcccggaaagtaacctggcggtgatttcggtcaacggtctgtttgccgctcgcgaagcgcgtcaggcgctgcaaaacgatctcaacgtgatgctgttttccgataacgtctcagttgaagatgaactggcgctcaagcaactggcccacgaaaaagggctgctgatgatggggccagactgtggcacggcgattatcaacggcgcggcgctctgttttggtaacgccgtgcgtcgcggcaacatcggtattgttggcgcatccggcaccggcagtcaggagttgagcgtccgcattcatgaatttggcggcggcgtttcgcaactgattggcaccggcgggcgcgacctgagcgagaaaatcggcggcctgatgatgctcgacgccatcgggatgctggaaaacgatccgcaaactgaaatcattgcgcttatctccaaaccgcctgcgcctgcggtggcccgcaaagtgctggaacgtgcgcgcgcctgccgcaagccggtggtcgtctgcttcctcgatcgtggcgaaacgccagtggatgagcaggggctacagtttgcccgcggcaccaaagaggcagcgctaaaagcggtgatgctctccggcgtgaaacaggaaaatctcgacctgcatacgcttaaccagccgttgattgcggatgtgcgtgcgcgtctgcaaccgcagcagaaatacattcgtggcctgttctgcggcggcacgctgtgcgacgaaaccatgttcgcggtgatggaaaaacatggcgatgtctacagcaacattcagcccgatccggaattccgcctgaaagatatcaaccgcagcatcaaacacaccttcctcgactttggcgatgacgacttcaccaacggcaagccgcacccgatgattgaccccaccaaccgcatcagtcgcttgatcgaagaggcgcgcgatccagaagtggcggtgatcgtgatggattttgtgctcggatttggatcgcatgaagatccggtcggctccaccatcgagacgatcaaagaagcgaaagcgatcgccgctgccgaaggacgcgagttgatcattctcgcctatgtgctgggtaccgatcttgatacgccatcgttagaacaacaaagccagatgctgcttgatgccggagtgattctggcgagcagcagcaccaataccggattgctggcgcgtgaatttatctgcaaaggggaggaagcctgatgagccagtcactgtttagccaaccattgaacgttattaacgtcggcatcgccatgtttagcgatgacctgaaaaagcagcatgtagaagtgactcaactcgactggacgccgccggggcagggcaatatgcaggtggtgcaggcgctggataacattgccgattcgccgctggcggacaaaatcgccgccgctaaccagcaggcgctggagcgtattatccagtcgcatccggtgctgattggttttgatcaggcgattaacgtggtgccgggcatgacggcgaaaaccattcttcacgccgggccgccgatcacctgggaaaaaatgtgcggcgcgatgaaaggcgcggtcaccggagcgctggtgttcgaaggactggcgaaagatctcgacgaggcggctgaactggcggcttccggggagatcaccttctcgccgtgtcacgagcacgactgcgtgggatcgatggcgggtgttacctcggcctcgatgtttatgcacatcgtaaaaaacaaaacctacggcaacatcgcttataccaacatgagcgagcagatggcgaagattttgcgtatgggcgctaacgaccagagcgtgattgaccgcctgaactggatgcgtgatgtgcagggaccaatactgcgcgacgcgatgaaaattatcggcgaaatcgatctgcgcttaatgctggcgcaggcgctgcatatgggcgatgagtgccataaccgcaataacgccgggacgacactgctgattcaggcgctgacgccggggattattcaggcgggttattccgtcgagcaacagcgcgaagtgtttgagtttgtcgccagcagcgactacttctccggcccgacgtggatggcgatgtgtaaagcggcgatggatgcggcgcatggcatcgaatacagcaccgtggtcaccaccatggcgcgtaacggcgtcgagttcggcctgcgggtcagcggcctgccggggcaatggtttaccggcccggcgcagcaggtgatcggcccgatgtttgccggttataagccggaagattcggggctggatatcggcgacagcgccatcaccgaaacctacggtattggcggatttgctatggcgaccgcgcccgctatcgtcgcgctggtgggcggcacggtggaagaagctattgatttctcccgtcagatgcgcgaaatcaccctcggtgaaaaccccaacgtcaccattccgctgctcggttttatgggcgtgccgtcggcaatcgacatcacccgcgtgggtagcagcggcattctgccggtgatcaacaccgccatcgcccataaagatgcgggcgtcggcatgattggcgcgggcattgtgcatccaccttttgcctgcttcgagaaagccattcttggctggtgcgaacgttacggcgtctgacctacatgttcatgccggatgcggcgtgaacgccttatccggcctacgaatggcgcaagaatctgtaggcctgataagcgtagcgcatcaggcatttgtcaccattgccggatgcggcgtgaacgccttatccggcctacgaatggcgcaagaatctgtaggcctgataagcgtagcgcatcaggcatttgccaccactgccggatgcggcgtggacgccttatccggcctacgagtggcgcgagaatctgtaggcctgataagcgtagcgcatcaggcatttgtcaccattgccggatgcggcgtgaacgccttatccggcctacgagtggcgcgagaattgtaggcctgataagcgtagcgcatcaggcagtctggcgttggtcataaccccatcaccctctgtagcggacataacaacatgaaagagcttgtggtcgttgccattggtggcaacagcattatcaaagataacgccagccagtcgattgagcatcaggcggaggcggtgaaagccgtcgccgatacggtgctggaaatgctggcttccgattacgacattgtgctgacccacggcaacgggccgcaggtcgggctggatttacgccgtgcggagattgcccacgagcgcgaagggctgcccttaacgccgctggcgaactgtgtggcagatacgcagggcggcatcggctatctgatccaacaggcgctgaataaccggctggcgcgtcacggcgagaagaaagccgtcaccgtggtgactcaggtggaagtggataaaaacgatccaggttttgcccatcccaccaagcccatcggcgcattctttagtgacagccagcgtgacgaattacaaaaggcaaaccctgactggtgttttgttgaagatgccgggcggggctatcgccgcgtggtcgcctcgccggaaccgaaacgtattgtcgaagcacctgccattaaagcgctgatccaacaaggttttgtcgtaattggcgcgggcggcggtggaattccggtagtgcgtactgacgcgggagattaccaaagcgtggacgcggttatcgacaaagatctctctaccgcgctgctggcccgtgaaattcacgccgacattcttgtgatcaccactggcgtcgaaaaagtgtgtattcactttggcaaaccgcagcagcaggcgctcgatcgggtggatattgccaccatgacccgctatatgcaggaagggcatttcccgcccggcagcatgttgccaaaaatcatcgccagcctgacatttttagaacaaggcggcaaagaagtgattatcaccacgccggaatgcctgcctgcggcgctgcgcggcgaaacgggcactcatattattaaaacgtaaggacgtaagatgaaagaaagcaatagccgccgtgaatttctgagccagagcggtaagatggtcaccgccgccgcgctgtttggtacctctgtgccgctcgcccatgcggcggtagctggcaccctaaactgcgaagcgaacaacaccatgaaaatcactgacccgcattactatctcgataacgtgctgctggaaaccggttttgactacgaaaatggcgtggcggtgcagacccgcacggcgcgccagaccgtggagattcaggacggcaaaattgtcgccctgcgcgagaacaagctgcatccggacgccacgctgccgcactatgacgctggcggtaagctgatgctgcccaccacccgcgacatgcatattcatctcgacaaaaccttttacggcgggccgtggcgctcgctcaatcgtccggcaggcaccaccatccaggacatgatcaaactcgagcagaaaatgctgccggaactgcaaccgtacactcaggagcgggcagaaaaactgattgatttattgcagtcgaaaggcaccaccattgcccgcagccactgcaatatcgaaccggtttccggcctgaaaaatctgcaaaatttgcaggcggtgctggcgcgacgtcaggcgggctttgagtgtgaaatcgtcgccttcccgcagcacggtttgctgctgtcgaaatctgaacctttaatgcgtgaagcgatgcaggcgggggcgcattacgtcggcggcctggacccgaccagtgttgatggcgcgatggaaaaatccctcgacaccatgttccagattgcgctggactacgacaaaggcgtcgatattcacctgcacgaaaccactccggcaggcgtggcagccatcaattatatggttgaaacggtagagaaaacgccacagctgaagggcaagctgaccatcagtcacgcctttgcgctggcaacgctcaacgagcaacaggtagatgaactggcgaaccggatggtggtgcaacaaatttctatcgcctcgacggtgccgattggcacgctacatatgccgctcaaacagttgcacgacaaaggcgtaaaagtgatgactggcactgacagcgttatcgaccactggtcgccttatggtctgggcgacatgctggaaaaagccaatctgtacgcgcagctctatattcgtcctaacgaacagaacctctcccgctcgctgtttttagccactggcgatgtattgccgctgaatgaaaaaggcgagcgtgtatggccaaaagcgcaggatgacgccagctttgtgctggtggacgcctcctgttccgccgaggcggtggcgcgtatctcgccgagaaccgcaacgttccataaagggcaactggtgtgggggagtgtggcaggttgatgcgcatttgaaacgcctgcaacggtgaatagtaagagatttaagccccagggagtggggcaatctgaatatgagtgtgtcggcagaaatggacattatctttgaggaatatgcccttattgacgttgtgtagataactatttgtctacgtgaaaagatcatcagttttgccgattttagtcttttacagatagcaaatatcacacttacaggcgctcgccttatggggaacgttgctgctctgtttcattcaggctcgcggcatgttggggctggatcgggtggtttaaatattggctatattcaatggacgcgttttgccgcgatgacatatcaggcgttgccaaatacacatagctaatcaggagtaaacacaatgaagatcaaagctgttggtgcatattccgctaaacaaccacttgaaccgatggatatcacccggcgtgaaccgggaccgaatgatgtcaaaatcgaaatcgcttactgtggcgtttgccattccgatctccaccaggtccgttccgagtgggcggggacggtttacccctgcgtgccgggtcatgaaattgtggggcgtgtggtagccgttggtgatcaggtagaaaaatatgcgccgggcgatctggtcggtgtcggctgcattgtcgacagttgtaaacattgcgaagagtgtgaagacgggttggaaaactactgtgatcacatgaccggcacctataactcgccgacgccggacgaaccgggccatactctgggcggctactcacaacagatcgtcgttcatgagcgatatgttctgcgtattcgtcacccgcaagtgcagctggcggcggtggctcctttgttgtgtgcagggatcaccacgtattcgccgctacgtcactggcaggccgggccgggtaaaaaagtgggcgtggtcggcatcggcggtctgggacatatggggattaagctggcccacgcgatgggggcacatgtggtggcatttaccacttctgaggcaaaacgcgaagcggcaaaagccctgggggccgatgaagttgttaactcacgcaatgccgatgagatggcggctcatctgaagagtttcgatttcattttgaatacagtagctgcgccacataatctcgacgattttaccaccttgctgaagcgtgatggcaccatgacgctggttggtgcgcctgcgacaccgcataaatcgccggaagttttcaacctgatcatgaaacgccgtgcgatagccggttctatgattggcggcattccagaaactcaggagatgctcgatttttgcgccgaacatggcatcgtggctgatatagagatgattcgggccgatcaaattaatgaagcctatgagcgaatgctgcgcggtgatgtgaaatatcgttttgttatcgataatcgcacactaacagactgaaaaaattaataaataccctgtggtttaacatattaacttcgctctccacttaactttttagttaaggagagcgaaataatatcaaagtagcagtaaaacctataacgtaaatttaaattgttaaattaacgccctccagtacacaatacttcacacgttagttatgagcgatttctgatagtgcctggtttaatcagagctttattatctgcgacgtttatttttatttaagagagatcgcgatgatatcattaaaagctccgcacaataatttgatgccatatacgcaacaaagcatacttaatacggttaaaaacaatcagttaccagaggatatcaaaagctccctggtttcctgtgtcgatatattcaaggttttgattaaacaatattatgattatccttatgattgtcgtgatgatttagtcgatgacgacaaactcattcatctcatggctgccgtacgagactgtgagtggtcagacgataacgcactcaccataaatgtgcagtttaatgatttccctggattttatgactggatggattaccctgatcacccggttaagtttgtttttcacatacttgaaaatcaaaaagggacagtttgggtatatgaccaggatgatgcgtttcttgatattaaagcaaacgtgcaggctggacgctttaccgggcttaagaaattagtgcagtttatcgattcagtgcgaacagattgcaaatgtattcttcttgaataccatatgcctttgctgagaattttccctaaagggaaagagtgtatgcatgtggaaaaatggcttcgcgaaatgtcgtctattccggagacagacgcgcccattaagcaggcgcttgcgcatggattattattacacttaaaaaatatctaccctgtttttcctgaatcactggtgatgttattgctctctgttctggacgtaaaaacatacagagatgatgcgcgattaaatgaatggatatctaatagagtgcaggaattaggtgacagatattatcctgtaaataagcacgttaaaatccgctacactctttagttcagaaagggttccacctgcaagttgttattccacctgagagtgaatcgcaatgcaggtaatcatttcatctgtatatctgtatgccaactggcattccatctcttttttcgccgatattttgttgtgatcggcgacacttcgcttaaaaaagcaccagtagtggtttcgcagccatgcggtgtataaaaaatgatctcatgcagatgttttgtgaatgtgttggttgacattcatatgaaaaaaatcataattccatcatgtttgtgtggggtcttttctgtatcttacgcatcgcactcaagcctgacagaaaatatgctgtaaggctcatatcaaaaaccgccattagctcatcaggaagagcagacgacaaccaggattgttgtatggtacggggttcgaggcctcgatggcggtccaacttttcaaaactcttctgaatcagatccccttattatcatccctgcaaagtggaacattgccattgtttggctattcaggatggggcagaccaatgaaaaaagcccacacaggggagagtgggctgaaatgggaagctaaagactcaagtaaacttatcggaaataaggaccacgcattacgggggctatcatcgccgatggccgtgattcggcaaatcaggttgattacgtagagagtaaattatctgctcaccgctgcgtcaccccttcgtaaatcaggcgtagcgcgaatacaccaataattgcaccaataacccgactggcaacgcgttgcatacgcccataagcacgacgcacagcgggcaaagaaaacgcctgactaagaaaaactcgccagataattgatgcgagcacaatccccgcccaggccattaaacgtgcccatgttggtgtttcggcatttaatgttactgagaaaatactgataaaaaataaaacggtttgcgggttagagagatcggtaattaatccgcggcgaaaaaagacataccagggggcgctaatcggttgttgtagtgtgctcatttgcggtgttgactggcggcgcatgctgcaccacgcaaaccataagagataagcgccgccgacgattctgataagcgaaaaaatctcctcacactgcgtaattagcgttgcaagaccaaacaaacccaacccggaataaaatgcatcgcccagcgccacgcccagcccggtcagcacccctgcgcgtcgaccggaagccaggctggtttgtactaccacaaagagattggctcccggattaaaaaaagtaatcacgaacagtcctacggtcaggtaaacggcatgcaaaggatccatagtgatttcatccataaataagtgaactaactgcatcatatttctaccaaaaataatcgggtgcgagagagatcacaaagtgtcttatttccggttactggcgtttatgccctgactgaactaattattaatcaacccaataatgtgggtgggtgatagtgtgataacaactctggagccgtaatatgaaaataatctctaaaatgttagtcggtgcgttagcgttagccgttaccaatgtctatgccgctgaattgatgaccaaagcggaatttgaaaaagttgaatcgcagtatgaaaaaataggtgatatttcaaccagcaatgaaatgtcgactgcagatgcaaaagaagatttgatcaaaaaagcggatgaaaaaggggctgatgtgttggtactgacctccggtcaaactgacaataagatccacggcacggcaaatatttataagaagaagtaattctgaatcctatgtaaacatctccgatgcgtaagtttatcggtgatcatctattgaaatttatgccggataaagcgttcgcgctgcattcggcagttcagcttttcagccgccgccagaacgtcgtccggctgatgcctaaataattcgccgctgctgttttatcgccattaaatttctccagtgcctgttgtggtgtcagtaagcgtggagcgggagttttcgccgactcgcgcgccagttccggcagtagcagttgcataaactgcggcgttaaatccggcgtcggttccacacttaaaaacagcgccagtcgttccatcatattgcgcagttcacgaatattgcctggccagtcgtagtgcagcagcacagtttcacttgcctgtaacccctggcgtaatgcagcagaaaatggggcggagagcgccgccagagacactttcaaaaagctttccgccagcggaagaatatccgccacccgctcgcgcagtggtggcaattgcagacgcaaaatactcagccgataaaacagatcacggcgaaaacgtccttgctgcatatcttcttccagattgcagtgagtggcgctaatgacccgtacatctaccggaacaggctgatgcccgccgacgcgggtgacctctttttcttccagcacccgcagcagccgggtctgcaaaggtagcggcatttcgccaatctcatccagaaacagcgtaccgccgtgggcaatttcgaacagcccggcgcgacctccgcgtcgcgagccggtaaacgccccttcctcatagccaaacagttctgcttccagcagcgattcggcaatcgccccgcagttgacggcaacaaacggatgcgactttttgccctgtcgcgcatcgtggcgggcaaaatattcccgatgaatcgcctgggccgccagctctttgcccgtccccgtttccccctcaatcaacaccgccgcactggagcgggcatacagcaaaatagtctgccgtacttgttccatctgtggtgattgaccgagcatatcgcccagcacgtaacgagtacgcagggcgttgcgggtggcatcgtgagtgttatggcgtaacgacatgcgcgtcatatccagcgcatcgctgaacgcctggcgcacggtggcggcggaatagataaaaattccggtcattccggcttcttctgccaaatcggtaatcagccctgcgccgaccaccgcttcggtgccgttagcttttagctcgttaatctgcccgcgtgcgtcttcctcggtaatgtagctacgttggtcgaggcgcaaattaaaggttttttgaaacgccaccagcgctggaatggtttcctgataggtgacaacgccgatagaagaggtgagttttccggcttttgccagtgcctgtaacacatcgtagccgctcggtttaatcaaaataactggcactgacaggcggcttttcaggtacgcgccgttagagccagccgcgatgatggcgtcacagcgttcgtttgccagtttcttgcggatgtaggtcactgctttttcaaagccaagctgaataggggtaatgttcgccaggtgatcaaactcgaggctgatatcgcgaaacagctcgaacaggcgcgttacagataccgtccagataaccggtttgtcgtcattaagccgtggtggatgtgccatagcgcaccgcaaagttaagaaaccgaatattgggtttagtcttgtttcataattgttgcaatgaaacgcggtgaaacattgcctgaaacgttaactgaaacgcatatttgcggattagttcatgactttatctctaacaaattgaaattaaacatttaattttattaaggcaattgtggcacaccccttgctttgtctttatcaacgcaaataacaagttgataacaaaggatgggctatgtctctacactctccaggtaaagcgtttcgcgctgcactgactaaagaaaatccattgcagattgttggcaccatcaacgctaatcatgcgctgttggcgcagcgtgccggatatcaggcaatttatctttctggcggtggcgtggcggcaggttcgctggggctgcccgatctcggtatttctacccttgatgatgtgctgaccgacattcgccgtatcaccgacgtttgttcgctgccgctgctggtggatgcggatatcggttttggttcttcggcctttaacgtggcgcgcaccgtgaaatcgatgattaaagccggtgcggcaggattgcatattgaagatcaggttggtgcgaaacgctgcggtcatcgtccgaataaagcgatcgtctcgaaagaagagatggtggatcggatccgcgcggcggtggatgcgaaaaccgatcctgattttgtgatcatggcgcgcaccgatgctttggcggtagaggggctggatgcggcgatcgagcgtgcgcaggcctatgttgaagcgggtgccgagatgttgttcccggaggcgattaccgaactcgccatgtaccgccagtttgccgatgcggtgcaggtgccgatcctcgccaacatcaccgaatttggtgccacgccgctgtttaccaccgacgaattacgcagcgcccatgtcgcaatggcgctgtacccactttcagcgttccgcgccatgaaccgcgccgctgaacatgtctacaacgtcctgcgccaggaaggcacgcagaaaagcgtcatcgacaccatgcagacccgcaacgagctgtacgaaagcatcaactactaccagtacgaagagaagctcgacaacctgtttgcccgtagccaggtgaaataaaaaacgcccgttgattgtattcgacagccgatgcctgatgcgtcgctgacgcgacttatcaggcctacgaggtgcactgaactgtaggtcggataagacggatggcgtcgcatccgacaaccgatgcctgatgcgccgctgacgtgacttatcaggcctacggggtgcactgaactgtaggtcggataagacgcatagcgtcgcatccgacaaccgatgcctgatgcgccgctgacgcgacttatcaggcctacggggtgcactgaactgtaggtcggataagacgcatagcgtcgcatccgacaaccgatgcctgatgcgccgctgacgcgacttatcaggcctacggggtgaactgaactgtaggtcggataagacgcatagcgtcgcatccgacaacaatctcgaccctacaaatgataacaatgacgaggacaacatgagcgacacaacgatcctgcaaaacagtacccatgtcattaaaccgaaaaaatctgtggcactttctggcgttccggcgggcaatacggcgctctgcaccgtgggtaaaagtggcaatgacctgcattaccgcggctacgatattcttgatctggcgaaacattgcgaatttgaagaagtggcgcatctgctgatccacggcaaactgccgacccgtgacgaactcgccgcttacaaaacgaaactgaaagccctgcgcggtttaccggctaacgtgcgtaccgtgctggaagccttaccggcggcgtcgcacccgatggatgttatgcgcaccggtgtttccgcgctcggctgcacgctgccagaaaaagaggggcataccgtctctggcgcgcgggatattgccgacaaactgctggcgtcgcttagctcgattctcctttattggtatcactacagccacaacggcgaacgcatccaaccggaaaccgatgacgactccatcggcggtcacttcctgcatctgctgcacggcgaaaagccatcgcaaagctgggaaaaggcgatgcatatctcgctggtgctgtacgccgaacacgagtttaacgcctccacctttaccagtcgggtgattgcgggcaccggctctgatatgtattccgcgattattggcgcgattggcgcactgcgcgggccaaaacacggcggggcgaatgaagtgtcgctggagatccagcaacgctacgaaacgccggacgaagccgaagcagatatccgcaagcgcgtggaaaacaaagaagtggtcattggttttggtcatccggtttacaccatcgctgacccgcgccaccaggtgattaaacgtgtggcgaagcagctctcgcaggaaggcggctcgctgaagatgtacaacatcgccgatcgcctggaaacggtgatgtgggagagcaaaaagatgttccccaatctcgactggttctctgctgtttcctacaacatgatgggcgttcccaccgagatgttcacaccactgtttgttatcgcccgcgtcaccggctgggcggcgcacattatcgaacaacgtcaggacaacaaaattatccgtccttccgccaattatgttggaccggaagaccgcccgtttgtcgcgctggataagcgccagtaaacctctacgaataacaataaggaaacgtacccaatgtcagctcaaatcaacaacatccgcccggaatttgatcgtgaaatcgttgatatcgtcgattacgtcatgaactacgaaatcagctctaaagtggcctacgacaccgcacattactgcctgctcgacacgctcggctgcggtctggaagctctcgaatacccggcctgtaaaaaactgctggggccaattgttcccggcaccgtcgtacccaacggcgtgcgcgtccccggaactcagttccagctcgaccccgtccaggcggcatttaacatcggcgcgatgatccgctggctcgatttcaacgatacctggctggcggcggagtggggccatccttccgacaacctcggcggcattctggcaacggcggactggctttcgcgcaacgcggtcgccagcggcaaagcgccgttgaccatgaaacaggtgctgaccgcaatgatcaaagcccatgaaattcagggctgcatcgcgctggaaaactcctttaaccgcgtcggcctcgaccacgttctgttagtgaaagtggcttccaccgccgtggtcgccgaaatgctcggcctgacccgcgaggaaattctcaacgccgtttcgctggcgtgggtggacggtcagtcgctgcgcacctatcgccatgcgccgaacaccggcacgcgtaaatcctgggcggcgggcgatgccacttcccgcgcggtacgtctggcactgatggcgaaaacgggcgaaatgggttacccgtcagccctgactgcgccggtgtggggcttctacgacgtctcctttaaaggtgaatcgttccgcttccagcgcccgtacggttcctacgttatggaaaatgtgctgttcaaaatctccttcccggcggagttccactcccagacggcagttgaagcagcgatgacgctctatgaacagatgcaggcagcaggcaaaacggcggcggatatcgaaaaagtgaccattcgcacccacgaagcctgtattcgcatcatcgacaaaaaagggccgctcaataacccggcagaccgcgatcactgcattcagtacatggtggcgatcccgctgctattcgggcgcttaacggcggcagattacgaggacaacgttgcgcaagataaacgcattgacgccctgcgcgagaagatcaattgctttgaagatccggcatttaccgctgactaccacgacccggaaaaacgcgccatcgccaatgccattacccttgagttcaccgacggcacacgatttgaagaagtggtggtggagtaccccattggtcatgctcgccgccgtcaggatggtattccgaaactggtcgataaattcaaaatcaatctcgcgcgccagttcccgactcgccaacagcagcgcattctggaggtttctctcgacagagctcgcctggaacagatgccggtcaatgagtatctcgacctgtacgtcatttaagtaaacggcggtaaggcgtaagttcaacaggagagcattatgtcttttagcgaattttatcagcgttcgattaacgaaccggagcagttctgggccgagcaggcccggcgtattgactggcagacgccctttacgcaaacgctcgatcacagcaatccgccgtttgcccgttggttttgtgaaggccgaaccaacttgtgccacaacgccatcgaccgctggctggagaaacagccagaggcgctggcgctgattgccgtctcttcggaaacagaagaagagcgcacctttacctttcgtcagctgcatgacgaagtgaacgcggtggcctcaatgttgcgttcattgggtgtgcagcgcggcgatcgggtgctggtgtatatgccgatgattgccgaagcgcatattactctgctggcctgcgcgcgcattggcgctattcactcggtggtgtttggtggatttgcctcgcacagcgtggcggcgcgaattgatgacgctaaaccggtgctgattgtctcggctgatgccggagcgcgcggtggcaaaatcattccctataaaaaattgctcgacgatgcgataagtcaggcgcagcaccagccacgccatgttttgctggtggatcgcgggctggcgaaaatggcgcgcgtcagcgggcgggatgtcgatttcgcgtcgttgcgccatcaacacatcggcgcgcgggtaccggtggcgtggctggaatccaacgaaacctcctgcattctctacacttccggcacgaccggcaaacctaaaggcgtgcagcgtgacgtcggcggatatgcggtggcgctggcgacctcgatggacaccatttttggcggcaaagcgggcagcgtgttcttttgcgcatcggatatcggctgggtggtggggcattcgtatatcgtttacgcgccgctgctggcggggatggcgactatcgtttacgaaggattgccgacctggccggactgcggcgtgtggtggaaaatcgtcgagaaatatcaggttagccggatgttctcagcgccgaccgccattcgcgtgctgaaaaaattccctaccgctgaaattcgcaaacacgatctctcgtcgctggaagtgctctatctggctggagaaccgctggacgagccgaccgccagttgggtgagcaatacgctggatgtgccggtcatcgacaactactggcagaccgaatccggctggccgattatggcgattgctcgcggtctggacgacaggccgacgcgtctgggaagccccggtgtgccgatgtatggctataacgtgcagttgcttaatgaagtcaccggcgaaccgtgtggcgtcaacgagaaagggatgctggtggtggaagggccgctgccgccggggtgtattcagaccatctggggcgacgacggccgctttgtgaagacttactggtcgctgttttcccgcccggtgtacgccacctttgactggggcatccgtgacgctgacggttatcactttattctcgggcgcactgacgatgtaattaacgttgccgggcatcggctggggacgcgcgagattgaagagagtatctccagccatccgggcgttgccgaagtggcggtggttggggtgaaagatgcgctgaaagggcaggtggcggtggcgtttgtcattccgaaagagagcgacagtctggaagatcgtgatgtggcgcactcgcaagagaaggcgattatggcgctggtggacagccagattggcaactttggccgcccggcgcacgtctggtttgtctcgcaattgccaaaaacgcgatccggaaaaatgctgcgccgcacgatccaggcgatttgcgaaggacgcgatcctggagatctgacgaccattgatgatcctgcgtcgttggatcagatccgccaggcgatggaagagtaggttattgtcggatgcgtcgcgcggtgcatccggcactgtgtgccgatgcctgatgcgacgctgacgcgttttatcatgcctacggacctgaaccgtaggtcggataaggcgctcgcgtcgcatccgacaccatgctcagatgcctgatgcgacgctgacgcgtcttatcaggcctacccactgtttttacaccgataatttttcccccacctttttgcactcattcatataaaaaatatatttccccacgaaaacgattgctttttatcttcagatgaatagaatgcggcggattttttgggtttcaaacagcaaaaagggggaatttcgtgtcgcaagataacaactttagccaggggccagtcccgcagtcggcgcggaaaggggtattggcattgacgttcgtcatgctgggattaaccttcttttccgccagtatgtggaccggcggcactctcggaaccggtcttagctatcatgatttcttcctcgcagttctcatcggtaatcttctcctcggtatttacacttcatttctcggttacattggcgcaaaaaccggcctgaccactcatcttcttgctcgcttctcgtttggtgttaaaggctcatggctgccttcactgctactgggcggaactcaggttggctggtttggcgtcggtgtggcgatgtttgccattccggtgggtaaggcaaccgggctggatattaatttgctgattgccgtttccggtttactgatgaccgtcaccgtcttttttggcatttcggcgctgacggttctttcggtgattgcggttccggctatcgcctgcctgggcggttattccgtgtggctggctgttaacggcatgggcggcctggacgcattaaaagcggtcgttcccgcacaaccgttagatttcaatgtcgcgctggcgctggttgtggggtcatttatcagtgcgggtacgctcaccgctgactttgtccggtttggtcgcaatgccaaactggcggtgctggtggcgatggtggcctttttcctcggcaactcgttgatgtttattttcggtgcagcgggcgctgcggcactgggcatggcggatatctctgatgtgatgattgctcagggcctgctgctgcctgcgattgtggtgctggggctgaatatctggaccaccaacgataacgcactctatgcgtcgggtttaggtttcgccaacattaccgggatgtcgagcaaaaccctttcggtaatcaacggtattatcggtacggtctgcgcattatggctgtataacaattttgtcggctggttgaccttcctttcggcagctattcctccagtgggtggcgtgatcatcgccgactatctgatgaaccgtcgccgctatgagcactttgcgaccacgcgtatgatgagtgtcaattgggtggcgattctggcggtcgccttggggattgctgcaggccactggttaccgggaattgttccggtcaacgcggtattaggtggcgcgctgagctatctgatccttaacccgattttgaatcgtaaaacgacagcagcaatgacgcatgtggaggctaacagtgtcgaataacgctttacaaacaattattaacgcccggttaccaggcgaagaggggctgtggcagattcatctgcaggacggaaaaatcagcgccattgatgcgcaatccggcgtgatgcccataactgaaaacagcctggatgccgaacaaggtttagttataccgccgtttgtggagccacatattcacctggacaccacgcaaaccgccggacaaccgaactggaatcagtccggcacgctgtttgaaggcattgaacgctgggccgagcgcaaagcgttattaacccatgacgatgtgaaacaacgcgcatggcaaacgctgaaatggcagattgccaacggcattcagcatgtgcgtacccatgtcgatgtttcggatgcaacgctaactgcgctgaaagcaatgctggaagtgaagcaggaagtcgcgccgtggattgatctgcaaatcgtcgccttccctcaggaagggattttgtcgtatcccaacggtgaagcgttgctggaagaggcgttacgcttaggggcagatgtagtgggggcgattccgcattttgaatttacccgtgaatacggcgtggagtcgctgcataaaaccttcgccctggcgcaaaaatacgaccgtctcatcgacgttcactgtgatgagatcgatgacgagcagtcgcgctttgtcgaaaccgttgctgccctggcgcaccatgaaggcatgggcgcgcgagtcaccgccagccacaccacggcaatgcactcctataacggggcgtatacctcacgcctgttccgcttgctgaaaatgtccggtattaactttgtcgccaacccgctggtcaatattcatctgcaaggacgtttcgatacgtatccaaaacgtcgcggcatcacgcgcgttaaagagatgctggagtccggcattaacgtctgctttggtcacgatgatgtcttcgatccgtggtatccgctgggaacggcgaatatgctgcaagtgctgcatatggggctgcatgtttgccagttgatgggctacgggcagattaacgatggcctgaatttaatcacccaccacagcgcaaggacgttgaatttgcaggattacggcattgccgccggaaacagcgccaacctgattatcctgccggctgaaaatgggtttgatgcgctgcgccgtcaggttccggtacgttattcggtacgtggcggcaaggtgattgccagcacacaaccggcacaaaccaccgtatatctggagcagccagaagccatcgattacaaacgttgaacgactgggttacagcgagcttagtttatgccggatgcggcgtgaacgccttatccggcctacgtagagcactgaactcgtaggcctgataagcgtagcgcatcaggcaattccagccgctgatctgtgtcagcggctaccgtgattcattcccgccaacaaccgcgcattcctccaacgccatgtgcaaaaatgccttcgcagcggctgtctgccagctgtagtttatgccggatgcggcgtgaacgccttatccggcctacgtagagcactgaactcgtaggcctgataagcgtagcgcatcaggcaattccagccgcagacctgtgtcagcggctaccgtgattcatttccgccaacaaccgcgcatttatccaacgccatgtgcaaaaatgccttcgcggcggctgtctgccagctatttttccgccgcaacaaaaccgccgttctctccagtagtggcggggcaagagaaatagctttaagcccgtcatgttgtgtggcaatcgctgctggtaacaatgtggaaagggaagtgcggcgaatcagctccagaaccgcgctaattgagttcgcctcaatgaccacctgtggatgtagccccgctttctcgcagtagtggtcaatttgctctctggtggcaaattccgcgctgagcaggaccagtttttcatcatgcaagcgactcaacgccacctgttcatggacggccagcggatgatgttgcgccacgactaacgctaaactttctgtcagtaaaggaattgcctccagctccggcgaatgcacaggcgcgaaggcaatcccaacgtccaactcgtcgcggcaaagcatatcctcgattttctcctgcgacatttcctgtagctggagcgtgatgctgggatagcgcgcatagaaatccgccattaaggggccgataaagtagctcgtaaaggtgggggtgacggcgatacgcagcgatcctcgcgtcagatcggcaacatcatgaatcgcccgtttacccgcccccagttcctgtaacgcccggctggcgtactgtcgccagacttctcctgcatcagtgagacgaatcgttcgcccgctacggtcaaacagcggcacgcctaaactctcctctaactggcgaatctgctgggaaagcgcaggttgggagacgtgcaacgcactggcggcacgggtgaagctgccatgttcagccacggcaagaaaataattgatatgtcgagagagcattcgcaacctataagtaaatccaatggaactcatcataaatgagacttttaccttatgacaatcggcgagtagtctgcctctcattccagagacagacagaggttaacggtgaaagagattattgatggattccttaaattccagcgcgaggcatttccgaagcgggaagccttgtttaaacagctggcgacacagcaaagcccgcgcacactttttatctcctgctccgacagccgtctggtccctgagctggtgacgcaacgtgagcctggcgatctgttcgttattcgcaacgcgggcaatatcgtcccttcctacgggccggaacccggtggcgtttctgcttcggtggagtatgccgtcgctgcgcttcgggtatctgacattgtgatttgtggtcattccaactgtggcgcgatgaccgccattgccagctgtcagtgcatggaccatatgcctgccgtctcccactggctgcgttatgccgattcagcccgcgtcgttaatgaggcgcgcccgcattccgatttaccgtcaaaagctgcggcgatggtacgtgaaaacgtcattgctcagttggctaatttgcaaactcatccatcggtgcgcctggcgctcgaagaggggcggatcgccctgcacggctgggtctacgacattgaaagcggcagcatcgcagcttttgacggcgcaacccgccagtttgtgccactggccgctaatcctcgcgtttgtgccataccgctacgccaaccgaccgcagcgtaaccttatttttaaaccatcaggagttccaccatgattcagtcacaaattaaccgcaatattcgtcttgatcttgccgatgccattttgctcagcaaagctaaaaaagatctctcatttgccgagattgccgacggcaccggtctggcagaagcctttgtaaccgcggctttgctgggtcagcaggcgcttcctgccgacgccgcccgcctggtcggggcgaagctggatctcgacgaagactccattctactgttgcagatgattccactgcgtggctgcattgatgaccgtattccaactgacccaacgatgtatcgtttctatgaaatgttgcaggtgtacggtacaaccctgaaagcgttggttcatgagaaatttggcgatggcattattagcgcgattaacttcaaactcgacgttaagaaagtggcggacccggaaggtggcgaacgtgcggtcatcaccttagatggtaaatatctgccgaccaaaccgttctgacagccatgcgcaaccatcaaaagacgttcacgatgctgctggtactggtgctgattggtcttaatatgcgaccactgctcacctccgtcgggccactgctaccgcaattgcgccaggcgagcggaatgagctttagcgtggctgccctgttgaccgctctgccggtggttaccatgggcgggctggcgctggccggaagctggcttcatcagcatgtcagcgaacgtcgcagtgtcgccatcagtctgttgctgattgccgtcggtgcattgatgcgtgagctttacccgcaaagtgcgctgctgcttagcagcgcactgcttggtggggtggggatcggcatcattcaggcggtgatgccttcggtgattaaacggcggtttcagcagcgcacgccactggtgatggggctgtggtccgcggctctgatgggcggcggtgggcttggtgccgccataacgccctggttagttcaacatagcgaaacctggtatcaaacactcgcctggtgggcgctgcctgccgttgttgcgctctttgcctggtggtggcaaagcgcccgcgaggtcgcctcttcccacaagacaacaaccactccggttcgcgtggtattcactccccgcgcgtggacgctgggtgtttacttcggtctgattaacggcggttacgccagcctgattgcctggttacccgctttctatattgagattggtgccagcgcgcagtacagcggttccttactggcattgatgacgcttgggcaagccgcaggagctttgctgatgcctgctatggctcgccatcaggatcggcgcaaactgttaatgctggcgctggtgttacaactggtggggttctgcggctttatctggctgccgatgcaattgccggtattgtgggcgatggtgtgtgggttaggtctgggcggcgcgtttccgctctgtttgctgctggcgctcgatcactctgtgcaaccggctattgctggcaagctggtggcgtttatgcagggaatcggttttatcatcgccgggcttgccccgtggttttctggcgtgctgcgtagtatcagcggcaattacctgatggactgggcatttcatgcgctgtgcgtcgttgggctgatgatcataaccctgcgttttgcaccagtacgttttccgcagctgtgggtcaaagaggcatgatgcgacgcttgttcctgcgctttgttcatgccggatgcggctaatgtagatcgctgaacttgtaggcctgataagcgcagcgtatcaggcaatttttataatttaaactgacgattcaactttataatctttgaaataatagtgcttatcccggtcgtttatttcgcgaataacccgacaaggaacgccagccgccacgacgtttggtggaatgtcttttgtgacgatactacccgcgccaataacagaattatccccgatggtgacgcctggattaataaccacatgacttccgatccagacgttattgccaatcgttatcggaaaagagtacatctcgccgttttttctcaattcatggtgtacagggtgtcccgtaacggaaagagtaacgttgggtgcaatcagtacgttatcaccgattgttaccgtgtagtcatcgacaatggttaaattgaaatttgcataaaaattgcggcctatatggatgttggaaccgtaagagaaatagacaggcggttctacccaggcgttttcccctaccgtggcaaacatttctttaatcaggctttctcttttttcaacttctgatggatgcgagtgattaaactcatacattaacgttttcccacgaagtcttttttccggtaagccttcgcacatatcggtaaatagcttgcctgctcttattctttcggtcattggcatgttcaatgcgatcactccgttatgatatgttggtcggataaggcgctcgcgccgcatccgacattgattgcttaagcgacttcattcacctgacgacgcagcagggaaagcgggccggggccgctaagcgtgaacacggaaattaaggtgaagcccagcgccaccagacccagcaccagataagcgccctggaaaccgatgctttcatacatattgcccgccagtacagacataaaaatcatcgccagttgcttaaagaagcagaaacagaccagataaatcgtcgctgaaaaacgcacttcaaactggctggtaatatatttaaagcagcccaccagcaggaacggtacttcaaacatatgcagcgttttcagaataaccacttccagcgctgaggtggcgaacgatgagccaataatacgtacagacataatagtgccagccagcagcagggcgtttttcccaccgatgcgattaatgatcagtggcgcaaagaacataatcgaggcgttaagtaattcgcccattgtcgttacgtagccaaatacccgcgtaccctgttcaccggtagcaaagaacgaagtaaagaaattagcaaactgttggtcaaaaacatcgtaggtgcaggaaacgccaataacatacagtgacaaaaaccacagttttggctgtctgaacagttccagtgccagcttaaggctaaatgccgaatggttggcacctaccgcattggcaaccgtggcagaagagggcgcatccgttttggcgaaaaagagtaaaacggcgaggatgagtgcacagccagagcccagccagaaaacaaactgattattgatggtgaacatgatgccgacaatcgaggcacacagcgcccagccaacacagccaaacatccgcgcgcgaccaaattcgaaattactgcgacggctgactttctcaataaatgcctctactgctggcgcaccggcgttaaaacaaaagcctagataaataccaccaacaatcgatcctactaaaatgttgtattgtaacagtggcccgaagataaaaataaagaacggcgcaaacatcactaacatgccggtaataatccacagcaggtatttgcgcagcccgagtttgtcagaaagcagaccaaacagcggttggaataatagcgagaacagagaaatagcggcaaaaataatacccgtatcacttttgctgatatggttgatgtcatgtagccaaatcgggaaaaacgggaagtaggctcccatgataaaaaagtaaaagaaaaagaataaaccgaacatccaaaagtttgtgttttttaaatagtacataatggatttccttacgcgaaatacgggcagacatggcctgcccggttattattatttttgacaccagaccaactggtaatggtagcgaccggcgctcagctggaattccgccgatactgacgggctccaggagtcgtcgccaccaatccccatatggaaaccgtcgatattcagccatgtgccttcttccgcgtgcagcagatggcgatggctggtttccatcagttgctgttgactgtagcggctgatgttgaactggaagtcgccgcgccactggtgtgggccataattcaattcgcgcgtcccgcagcgcagaccgttttcgctcgggaagacgtacggggtatacatgtctgacaatggcagatcccagcggtcaaaacaggcggcagtaaggcggtcgggatagttttcttgcggccctaatccgagccagtttacccgctctgctacctgcgccagctggcagttcaggccaatccgcgccggatgcggtgtatcgctcgccacttcaacatcaacggtaatcgccatttgaccactaccatcaatccggtaggttttccggctgataaataaggttttcccctgatgctgccacgcgtgagcggtcgtaatcagcaccgcatcagcaagtgtatctgccgtgcactgcaacaacgctgcttcggcctggtaatggcccgccgccttccagcgttcgacccaggcgttagggtcaatgcgggtcgcttcacttacgccaatgtcgttatccagcggtgcacgggtgaactgatcgcgcagcggcgtcagcagttgttttttatcgccaatccacatctgtgaaagaaagcctgactggcggttaaattgccaacgcttattacccagctcgatgcaaaaatccatttcgctggtggtcagatgcgggatggcgtgggacgcggcggggagcgtcacactgaggttttccgccagacgccactgctgccaggcgctgatgtgcccggcttctgaccatgcggtcgcgttcggttgcactacgcgtactgtgagccagagttgcccggcgctctccggctgcggtagttcaggcagttcaatcaactgtttaccttgtggagcgacatccagaggcacttcaccgcttgccagcggcttaccatccagcgccaccatccagtgcaggagctcgttatcgctatgacggaacaggtattcgctggtcacttcgatggtttgcccggataaacggaactggaaaaactgctgctggtgttttgcttccgtcagcgctggatgcggcgtgcggtcggcaaagaccagaccgttcatacagaactggcgatcgttcggcgtatcgccaaaatcaccgccgtaagccgaccacgggttgccgttttcatcatatttaatcagcgactgatccacccagtcccagacgaagccgccctgtaaacggggatactgacgaaacgcctgccagtatttagcgaaaccgccaagactgttacccatcgcgtgggcgtattcgcaaaggatcagcgggcgcgtctctccaggtagcgaaagccattttttgatggaccatttcggcacagccgggaagggctggtcttcatccacgcgcgcgtacatcgggcaaataatatcggtggccgtggtgtcggctccgccgccttcatactgcaccgggcgggaaggatcgacagatttgatccagcgatacagcgcgtcgtgattagcgccgtggcctgattcattccccagcgaccagatgatcacactcgggtgattacgatcgcgctgcaccattcgcgttacgcgttcgctcatcgccggtagccagcgcggatcatcggtcagacgattcattggcaccatgccgtgggtttcaatattggcttcatccaccacatacaggccgtagcggtcgcacagcgtgtaccacagcggatggttcggataatgcgaacagcgcacggcgttaaagttgttctgcttcatcagcaggatatcctgcaccatcgtctgctcatccatgacctgaccatgcagaggatgatgctcgtgacggttaacgcctcgaatcagcaacggcttgccgttcagcagcagcagaccattttcaatccgcacctcgcggaaaccgacatcgcaggcttctgcttcaatcagcgtgccgtcggcggtgtgcagttcaaccaccgcacgatagagattcgggatttcggcgctccacagtttcgggttttcgacgttcagacgtagtgtgacgcgatcggcataaccaccacgctcatcgataatttcaccgccgaaaggcgcggtgccgctggcgacctgcgtttcaccctgccataaagaaactgttacccgtaggtagtcacgcaactcgccgcacatctgaacttcagcctccagtacagcgcggctgaaatcatcattaaagcgagtggcaacatggaaatcgctgatttgtgtagtcggtttatgcagcaacgagacgtcacggaaaatgccgctcatccgccacatatcctgatcttccagataactgccgtcactccagcgcagcaccatcaccgcgaggcggttttctccggcgcgtaaaaatgcgctcaggtcaaattcagacggcaaacgactgtcctggccgtaaccgacccagcgcccgttgcaccacagatgaaacgccgagttaacgccatcaaaaataattcgcgtctggccttcctgtagccagctttcatcaacattaaatgtgagcgagtaacaacccgtcggattctccgtgggaacaaacggcggattgaccgtaatgggataggtcacgttggtgtagatgggcgcatcgtaaccgtgcatctgccagtttgaggggacgacgacagtatcggcctcaggaagatcgcactccagccagctttccggcaccgcttctggtgccggaaaccaggcaaagcgccattcgccattcaggctgcgcaactgttgggaagggcgatcggtgcgggcctcttcgctattacgccagctggcgaaagggggatgtgctgcaaggcgattaagttgggtaacgccagggttttcccagtcacgacgttgtaaaacgacggccagtgaatccgtaatcatggtcatagctgtttcctgtgtgaaattgttatccgctcacaatttcacacaacatacgagccggaagcataaagtgtaaagcctggggtgcctaatgagtgagctaactcacattaattgcgttgcgctcactgcccgctttccagtcgggaaacctgtcgtgccagctgcattaatgaatcggccaacgcgcggggagaggcggtttgcgtattgggcgccagggtggtttttcttttcaccagtgagacgggcaacagctgattgcccttcaccgcctggccctgagagagttgcagcaagcggtccacgctggtttgccccagcaggcgaaaatcctgtttgatggtggttaacggcgggatataacatgagctgtcttcggtatcgtcgtatcccactaccgagatatccgcaccaacgcgcagcccggactcggtaatggcgcgcattgcgcccagcgccatctgatcgttggcaaccagcatcgcagtgggaacgatgccctcattcagcatttgcatggtttgttgaaaaccggacatggcactccagtcgccttcccgttccgctatcggctgaatttgattgcgagtgagatatttatgccagccagccagacgcagacgcgccgagacagaacttaatgggcccgctaacagcgcgatttgctggtgacccaatgcgaccagatgctccacgcccagtcgcgtaccgtcttcatgggagaaaataatactgttgatgggtgtctggtcagagacatcaagaaataacgccggaacattagtgcaggcagcttccacagcaatggcatcctggtcatccagcggatagttaatgatcagcccactgacgcgttgcgcgagaagattgtgcaccgccgctttacaggcttcgacgccgcttcgttctaccatcgacaccaccacgctggcacccagttgatcggcgcgagatttaatcgccgcgacaatttgcgacggcgcgtgcagggccagactggaggtggcaacgccaatcagcaacgactgtttgcccgccagttgttgtgccacgcggttgggaatgtaattcagctccgccatcgccgcttccactttttcccgcgttttcgcagaaacgtggctggcctggttcaccacgcgggaaacggtctgataagagacaccggcatactctgcgacatcgtataacgttactggtttcacattcaccaccttgaattgactctcttccgggcgctatcatgccataccgcgaaaggttttgcgccattcgatggtgtcaacgtaaatgcatgccgcttcgccttccggccaccagaatagcctgcgattcaaccccttcttcgatctgttttgctacccgttgtagcgccggaagatgcttttccgctgcctgttcaatggtcattgcgctcgccatatacaccagattcagacagccaatcacccgttgttcactgcgcagcggtacggcgatagaggcgatcttctcctcctgatcccagccgcggtagttctgtccgtaaccctctttgcgcgcgcgcgccagaatggcttccagctttaacggttcccgtgccagttgatagtcatcaccggggcgggaggctaacatttcgattaattccttgcggtcttgttccgggcaaaaggccagccaggtcaggcccgaggcggttttcagaagcggcaaacgtcgcccgaccattgcccggtgaaaggataagcggctgaaacggtgagtggtttcgcgtaccaccattgcatcaacatccagcgtggacacatctgtcggccataccacttcgcgcaacagatcgcccagcagtggggccgccagtgcagaaatccactgttcgtcacgaaatccttcgcttaattgccgcactttgatggtcagtcgaaaactatcatcggaggggctacggcggacatattcctcttcctgcagcgtctccagcagtcgccgcacagtggtgcgatgcaggccgctgagttccgccagcagcccgacgctggcaccgccatcaagtttatttaacatatttaataacattagaccgcgggttaagccgcgcacggttttgtattccgtctgctcattgttctgcatattaattgacatttctatagttaaaacaacgtggtgcacctggtgcacattcgggcatgttttgattgtagccgaaaacacccttcctatactgagcgcacaataaaaaatcatttacatgtttttaacaaaataagttgcgctgtactgtgcgcgcaacgacattttgtccgagtcgtgaggtactgaaatggcaatacaacaccctgacatccagcctgctgttaaccatagcgttcaggtggcgatcgctggtgccggcccggttgggctgatgatggcgaactatctcggccagatgggcattgacgtgctggtggtggagaaactcgataagttgatcgactacccgcgtgcgattggtattgatgacgaggcgctgcgcaccatgcagtcggtcggcctggtcgatgatgttctgccgcacactacgccgtggcacgcgatgcgttttctcaccccgaaaggccgctgttttgctgatattcagccaatgaccgatgaatttggctggccgcgccgtaacgcctttattcagccgcaggtcgatgcggtgatgctggaaggggtgtcgcgttttccgaatgtgcgctgcttgttttcccgcgagctggaggccttcagtcagcaagatgacgaagtgaccttgcacctgaaaacggcagaagggcagcgggaaatagtcaaagcccagtggctggtagcctgtgacggtggagcaagttttgtccgtcgcactctgaatgtgccgtttgaaggtaaaactgcgccaaatcagtggattgtggtagatatcgccaacgatccgttaagtacgccgcatatctatttgtgttgcgatccggtgcgcccgtatgtttctgccgcgctgcctcatgcggtacgtcgctttgaatttatggtgatgccgggagaaaccgaagagcagctgcgtgagccgcaaaatatgcgcaagctgttaagcaaagtgctgcctaatccggacaatgttgaattgattcgccagcgtgtctacacccacaacgcgcgactggcgcaacgtttccgtattgatcgcgtactgctggcgggcgatgccgcgcacatcatgccggtatggcaggggcagggctataacagtggtatgcgcgacgcctttaacctcgcatggaaactggcgttggttatccaggggaaagcccgcgatgcgctgctcgatacctatcaacaagaacgtcgcgatcacgccaaagcgatgattgacctgtccgtgacggcgggcaacgtgctggctccgccgaaacgctggcagggtacgttacgtgacggcgtttcctggctgttgaattatctgccgccagtaaaacgctacttcctcgaaatgcgcttcaagccgatgccgcaatattacggcggtgcgctgatgcgtgagggcgaagcgaagcactctccggtcggcaagatgtttattcagccgaaagtcacgctggaaaacggcgacgtgacgctgctcgataacgcgatcggcgcgaacttcgcggtaattggctggggatgcaatccactgtgggggatgagcgacgagcaaatccagcagtggcgcgcgttgggcacacgcttcattcaggtggtgccggaagtgcaaattcataccgcacaggataaccacgacggcgtactacgcgtgggcgatacgcaaggtcgcctgcgtagctggttcgcgcaacacaatgcttcgctggtggtgatgcgcccggatcgctttgttgccgccaccgccattccgcaaaccctgggcaagaccctgaataaactggcgtcggtgatgacgctgacccgccctgatgccgacgtttctgtcgaaaaggtagcctgatatgcacgcttatcttcactgtctttcccactcgccgctggtggggtatgtcgacccggcgcaagaggtgctcgatgaggtcaatggcgtgattgccagcgcccgcgagcgtattgcggcattctcccctgaactagtggtgctgtttgcgccagatcactacaacggctttttctatgacgtgatgccaccgttctgtttaggcgttggagcgacggcaattggtgatttcggcagtgcggcaggagagctgcccgtgcctgtggagctggcggaggcctgtgcgcatgccgtcatgaagagcgggatcgatcttgccgtttcttactgtatgcaggtggaccacgggttcgcccagccgctggagttcctgctcggtgggctggataaggtgccagttctgcctgtgttcatcaacggtgtcgccacgccgctgcccggtttccagcgtacccgcatgttgggtgaagccattggacgtttcaccagcactctcaataaacgcgtgctgttcctgggttccggtgggctttcccatcagccgccggtgcccgaactggcgaaagccgatgcccatatgcgcgaccgtctgttggggagcgggaaagatttacccgccagtgagcgcgaattgcgtcagcaacgggtgattagcgccgctgagaagtttgttgaggatcagagaacgctgcatccgctcaacccgatttgggataaccagttcatgactttgctggagcagggacgcatacaggaactggatgccgtcagtaacgaagagctttccgccattgccggaaagtcgacacatgaaatcaaaacctgggtcgccgcttttgccgctatttctgcgtttggcaactggcgtagcgaagggcgttattaccgcccaatcccggagtggattgccggatttggctcgttaagcgccagaacagagaactgaatatgcaggagaagatgatgagttatcagccacaaaccgaagccgccaccagccgttttctgaatgtagaagaagcgggtaaaacgctgcgcatccattttaatgactgcggacaaggcgacgaaaccgttgtcctgctgcatggttccggcccgggtgctactggctgggcgaacttcagccgcaatatcgatccgctggtagaggcgggctatcgggtgatcctgctggattgtccgggttggggcaagagcgattcggtcgttaatagtggttcgcgatcggatcttaatgcacgaatcctgaaaagcgtggtggatcaactggatatcgccaaaatccacctgctgggcaactcgatggggggccatagttctgtggcgttcacccttaaatggccggagcgcgtcggcaaactggtgctgatgggcggcggtacgggcggcatgagtttgtttacgccgatgccaaccgaaggtattaagcgactgaatcagctttatcgtcagccgactatcgaaaacctgaagctgatgatggatatcttcgtttttgataccagcgatttgaccgacgccctgtttgaagcgcgcctgaataatatgctgtcgcgccgcgatcacctggaaaacttcgttaagagcctggaagctaatccgaaacagttcccggattttggcccacgtctggcggaaatcaaagcgcaaaccctgattgtctgggggcgcaacgaccgctttgtgccgatggatgcgggtctgcgtctgctgtccggcattgccggttctgaactgcatatcttccgcgactgtggtcactgggcgcagtgggaacatgccgacgctttcaatcaactggtgctgaatttcctcgcacgcccttaaggaatggtcatgacgaagcatactcttgagcaactggcggcggatttacgccgcgccgcagagcagggcgaagcgattgcaccgctgcgcgatctgattggtatcgataacgctgaagcggcttacgccattcagcacataaatgtgcaacatgacgttgcgcaggggcgtcgcgtggtagggcgtaaagtgggcctgacacatccgaaagtgcaacaacaactgggcgttgatcaaccggattttgggacgttatttgccgacatgtgttatggcgataacgaaatcattcctttttcccgtgttctgcaaccccgcattgaagcggagatcgcactggtgttgaaccgcgatttgcccgcaaccgatatcaccttcgacgaattgtataacgccattgaatgggtacttccggcgctggaagtggtggggagccgcattcgcgactggtcgattcagtttgtcgataccgtggcagataacgcctcctgtggggtgtatgtcatcggcggtccggcgcaacgtccggcggggttagacctgaaaaactgcgccatgaagatgacgcgtaataacgaagaggtttctagcgggcgcggcagcgaatgcctgggacatccgcttaatgcggccgtctggctggcacgcaaaatggccagtctgggtgaaccgctgcgcaccggagatatcattcttaccggggcattaggtccgatggtggcggtgaatgcgggcgatcgttttgaagcccatattgaaggcataggttcagttgctgcgacattttcaagcgcagccccaaaaggaagtctgtcatgagtaagcgtaaagtcgccattatcggttctggcaacattggtaccgatctgatgattaaaattttgcgtcacggtcagcatctggagatggcggtgatggttggcattgatcctcagtccgacggtctggcgcgcgccagacgtatgggcgtcgccaccacccatgaaggggtgatcggactgatgaacatgcctgaatttgctgatatcgacattgtatttgatgcgaccagcgccggtgctcatgtgaaaaacgatgccgctttacgcgaagcgaaaccggatattcgcttaattgacctgacgcctgctgccatcggcccttactgcgtgccggtggttaacctcgaggcgaacgtcgatcaactgaacgtcaacatggtcacctgcggcggccaggccaccattccaatggtggcggcagtttcacgcgtggcgcgtgtttattacgccgaaattatcgcttctatcgccagtaaatctgccggacctggcacgcgtgccaatatcgatgaatttacggaaaccacttcccgagccattgaagtggtgggcggcgcggcaaaagggaaggcgattattgtgcttaacccagcagagccaccgttgatgatgcgtgacacggtgtatgtattgagcgacgaagcttcacaagatgatatcgaagcctcaatcaatgaaatggctgaggcggtgcaggcttacgtaccgggttatcgcctgaaacagcgcgtgcagtttgaagttatcccgcaggataaaccggtcaatttaccgggcgtggggcaattctccggactgaaaacagcggtctggctggaagtcgaaggcgcagcgcattatctgcctgcctatgcgggcaacctcgacattatgacttccagtgcgctggcgacagcggaaaaaatggcccagtcactggcgcgcaaggcaggagaagcggcatgaacggtaaaaaactttatatctcggacgtcacattgcgtgacggtatgcacgccattcgtcatcagtattcgctggaaaacgttcgccagattgccaaagcactggacgatgcccgcgtggattcgattgaagtggcccacggcgacggtttgcaaggttccagctttaactatggtttcggcgcacatagcgaccttgaatggattgaagcggcggcggatgtggtgaagcacgccaaaatcgcgacgttgttgctgccaggaatcggcactattcacgatctgaaaaatgcctggcaggctggcgcgcgggtggttcgtgtggcaacgcactgtaccgaagctgatgtttccgcccagcatattcagtatgcccgcgagctcggaatggacaccgttggttttctgatgatgagccatatgaccacgccggagaatctcgccaagcaggcaaagctgatggaaggctacggtgcgacctgtatttatgtggtggattctggcggtgcgatgaacatgagcgatatccgtgaccgtttccgcgccctgaaagcagagctgaaaccagaaacgcaaactggcatgcacgctcaccataacctgagtcttggcgtggcgaactctatcgcggcggtggaagagggctgcgaccgaatcgacgccagcctcgcgggaatgggcgcgggcgcaggtaacgcaccgctggaagtgtttattgccgccgcggataaactgggctggcagcatgggaccgatctctatgcgttaatggatgccgccgacgacctggtgcgtccgttgcaggatcgaccggtacgagtcgatcgcgaaacgctggcgctgggatacgctggtgtttactcgagcttcctgcgtcactgtgaaacggcggcggcgcgttatggcttaagtgcggtggatattctcgttgagctgggcaaacgccggatggttggcggccaggaggatatgatcgttgacgtggcgctggatctgcgcaacaacaaataatgatgactgccgagaacgtgcattttgtatgcccatcccagcacgactgccggatgcggcgtgaacgccttatccggcctacggatggcgtgagaatttgtaggtctgataagacgcgttagcgtcgcatcaggcatctgcgcacgactgccggatgcggcgtgaacgccttatccggcctacggatggcgcgggaatttgtaggcctgataagacgcgttagcgtcgcatcaggcatctgcacacgactgccggatgcgataaacgtcttgtccggcctacatttcgcccgtaggcagtcattaaatagttctgattacgcggctggcaatgtatcagtcgcgattcacctgcactcgcaacgaggttcatcttatgtcgactcgtaccccttcatcatcttcatcccgcctgatgctgaccatcgggctttgttttttggtcgctctgatggaagggctggatcttcaggcggctggcattgcggcgggtggcatcgcccaggctttcgcactcgataaaatgcaaatgggctggatatttagcgccggaatactcggtttgctacccggcgcgttggttggcggaatgctggcggaccgttatggtcgcaagcgcattttgattggctcagttgcgctgtttggtttgttctcactggcaacggcgattgcctgggatttcccctcactggtctttgcgcggctgatgaccggtgtcgggctgggggcggcgttgccgaatcttatcgccctgacgtctgaagccgcgggtccacgttttcgtgggacggcagtgagcctgatgtattgcggtgttcccattggcgcggcgctggcggcgacactgggtttcgcgggggcaaacttagcatggcaaacggtgttttgggtaggtggtgtggtgccgttgattctggtgccgctattaatgcgctggctgccggagtcggcggttttcgctggcgaaaaacagtctgcgccaccactgcgtgccttatttgcgccagaaacggcaaccgcgacgctgctgctgtggttgtgttatttcttcactctgctggtggtctacatgttgatcaactggctaccgctacttttggtggagcaaggattccagccatcgcaggcggcaggggtgatgtttgccctgcaaatgggggcggcaagcgggacgttaatgttgggcgcattgatggataagctgcgtccagtaaccatgtcgctactgatttatagcggcatgttagcttcgctgctggcgcttggaacggtgtcgtcatttaacggtatgttgctggcgggatttgtcgcggggttgtttgcgacaggtgggcaaagcgttttgtatgccctggcaccgttgttttacagttcgcagatccgcgcaacaggtgtgggaacagccgtggcggtagggcgtctgggggctatgagcggtccgttactgaccgggaaaatgctggcattaggcactggcacggtcggcgtaatggccgcttctgcaccgggtattcttgttgctgggttggcggtgtttattttgatgagccggagatcacgaatacagccgtgcgccgatgcctgacgtgccttattaggcaggggcgaaagggacttcaccccaatacacctacggcgtttacaggtatactcgctaaaaattattcagcgggtttggaaacaaagatggcaaaacttaccttacaagagcagttgctcaaagcaggattagtcaccagcaaaaaagcggcgaaggtggagagaacggcgaaaaaatcgcgcgttcaggcgcgtgaagctcgggcggcggtagaagaaaataaaaaggcacagcttgagcgtgataaacagcttagcgaacagcaaaaacaagcggcgttggcgaaagaatataaagctcaggtgaagcagcttattgaaatgaaccgaatcaccattgccaatggcgatattggttttaacttcactgacggcaatctgattaagaagatttttgtcgataagctcacacaggcgcagttgattaatggtcgtctggcgattgcccgcttgttggtcgataacaatagcgaaggtgaatacgccattattcccgccagcgttgccgataaaattgctcagcgcgatgccagcagtatagtgttgcacagcgcgctcagcgccgaagagcaggatgaagacgacccgtatgccgacttcaaagtgcctgatgatttgatgtggtaaacatagataagtcgtgcgcagatgcctgatgcgacgctatgcgcgtcttatcaggcctacggtttatgggcgaagtgtagaccggataaggcgttcacgccgcatccggcagtcgtgcgccatgcctgatgcgacgctttgcgcgtcttatcaggcctacggcttacgggcgaagtgtaggccggataaggcgttcacgccgcatccggcagtcgtgctattatcaacgcatattcagtttattggcgtggtaggcaatatgctcgccaataaaactggagacaaaataatagctgtgatcataaccctcgtgataacggattaacgtcttgatattcatctcctggcagatcttttcaagatttggagtccgcagctgttctgcgtaaaaatcatcactcaacccctgatcaaccatgatttccgcaacgcgttgaccttgtgaaataagactcaccgggtcgtaatccaaccaggcatctttattttcagcaagatatgcagcaaaggcttgctgtccccacggcacttgcgatggggagacaatgggcgaaaacgccgagacgctgacatattcatctgggttacgtaacgccagcaccagcgcgcccagcccgcccatagaatgaccagagatagactttttggccgttgccggaaaatgatgcatcactaaatccggcagctcgttgcggatatagtcatacattttgtaatgttcattccacggcgcttgcgtcgcgttcaggtaaaacccggcaccttgcccgagatcgtaacggtcagcatctgcgacatgactgcctcgcggactggtgtccggcgcaacaacaataatgttgtgctcagccgcgtaacgctgcatccccgatttagtaatgaaattctgctcgttgcaggtcaggcctgaaagccagtacagcaccggcaatttttcattcgcggcttttggtgggagatagacgccgacattcatttcacatttcagtgattgggaataatgccgatacacattttgccagccgccaaagctggcatgtttttcaatgagttccatcagtcattatctcacggttaatcccccggacggctgcccagggagagtattaagaaccccgtctgaagtggacggggtatacctgcgggaaatcagtaacgaattacggttcgaatggatttgccttcatgcatcaggtcgaaggcgtcattaatttcatcaaggctcatggtatgcgtgacaaacggttccagatcgatatcacctttcatcgcatcttcaaccatacccggtaactgggaacgacctttcacgccgccaaacgcggaacctttccatacgcgaccagtgaccaactggaatggacgggtggagatttcctgaccagaacctgccaccccgatgatcaccgactgaccccagccgcggtgtgcactttccagcgccgcacgcatcacgttgacgttaccgatgcattcaaaggtatggtcgataccccatttgttgatatccagcaggacatctttaatcggtttgtcgtagtcattcgggttaatgcagtcggtagcaccgaagcgacgagccagatcgaatttcttcgggttggtatcgatagcgataatccgtcccgctttcgcctgacgcgcgccctgaaccactgccagaccaatcgcgccaagaccaaacacggcaacagaatcacctggctggactttagctgtgttgtgcaccgcgccaataccggtggtcacgccacagcccagcaggcagacgtgttcatggtttgcttctggattaattttggccagagacacttccgcgaccacggtgtattcactgaatgttgagcatcccatgtagtgataaagcggctgcccgttgtaagaaaaacgggtggtgccgtctggcatcaagcctttaccctgggtttcgcgaaccgcaacacagaggttagttttgccagaacgacagaactcacactcgccgcactccgcggtgtaaagcgggatcacatggtcgccaggtttgacgctggttacgccttcaccgacttcaaccacaacgccggccccttcgtgaccgagaaccaccgggaatacaccttccgggtcatccccggagagggtaaatgcgtcggtatggcaaacgccggtatgggtgactttaatcagcacttcaccttttttcggtggtgcaacgtcaatttcaacgatttccagcggtttaccgggagcaaatgcaacggcagcacgtgatttcatctctcgctcttcctcaatatggtaatagattcagctatttaagataggctcgaaccagttcaatagtgtcgtcaacggattggctgacttcgcggctgtagcagtcatttcggtcaaacgtttcccggatatggctttcaagcacttctgccatcagcccattagccgcgccccgaacggcagcgatctgttggagtatggcacggcattcggcatcaccctccagcgaccgttccagagcatcaatctgccctcgaatacgacgaactcgagtaaggacctttttcttctcttccggagtactgggcatttcgcacctcattatctgcacgcaatatactataggggggtatgctatatgtcaatgcatacccccctatagtatataacactggagaataaaatttatccggtgaatgtggtcggaaaacaaagaggaaagggggggggctaatcggcagggaaggccgccccggatagcgggcggcagaaggaatcagaatttccaggtcagatgggctgcaagttgcagaccgttataatcatcggttggggtgtcgtaccacactttacctgccgtcagcccgagattaagttgctcagtcagcggttgaatacgttgcagactgacgctcttcatgctgccgtagcgtgtttctggcgtccagtcataggtgtaagcgcctgttccgcggcttagccatagttgcgtataaccagtgccgcgcgggtcattcagacgcacggaaatcatattgctataactaccacctgcatcgctggagtcataatgggtatagcggtagctggtgatcaccgggccagtatagagtgatacgccgccttgccaggcatcgacttcgacatcatcgtaatatttagtgtagcgataaccggtcgtgaaaagcgtttttggcaacagggccaggttaatatcctgacgaaaatcctggcgggcaaagaccggcgtattatccgcaaaggcaatacccgttcgggttgtcagccagttattccatttataccagaccgcaccctgaccgcgagtggcattgaaatgttcagtttcataatcacgacgcccctgggaaagattaaaaagcagcgttgcgttttcaactttcgccaccagttcagcatacgctaaattacggttgccatgatcgccagaataatcggtaaaatcgtagcccgcggtaatggaggttaacccggcataagcgggcaatgcgctaaaaatggccgccgctaataacgtccgttttatcattttaatctcctgtacggataagttcttgtcggagtgaataagttccggcaggtaaattacgttctacaatcacgcgcgggccaagttgcgtgttcggggaaataattcgcccaggcaaaattataacttgtacgccaaggcgtgaacgctgcccgatataacaacctaatttatcgcatccggtagcgataattccctctggagttcgaacagacacaggctgttcatccagacgatgattactggtacgtacttgtgcgcccaaatatgcctggtttgcaactaccgagtcggcaataaaacattgcggaccaatcgttgcttccgcttcaataaccgcatttttaatttcggtggcaaaaccaatttttacaccattgctgattattgtgccaggacgaataaacgcataattacctatcaggcagtttgcgccaatcactaccggaccctgaataacggcaccatgacaaatacgggtattcgcgccgataacaacttcacctgcagtttcatcaataattacctggtctgcaatctgaatatttttctctttaacattaagcttcagatagtttttcagttcctgtgacagaaggttgggaataagcggttgacgcttccaccagtgcggaatagcgggtgggtttgtcgcgctgaggttcgcgtccagtaaaaaaggcaataagtccataaataatccagatggcataagctaataatacatacacaacggaaagcggcgctaaaggcaccaacaaccagcaacgatgaaaccaggcgctaaaagcaccaataacacaaactacgccgatccagataagcggaaacattgccaacaccacaccatgcggcccggtggtgatgaattcattaaaccaggtagtgagataaatcccaacgccataaagcacaaccaacagcataggaaatatactgaagataccgaagcggctaaataaaagtcttttatgcaggcgcatacagaccgcgtatcccacaatccaacgccgccagcgacgccactcctcacgcgggctgttgcattcctgtgggtatacgatgcagcgattcgcctgccgaatacggtagccgtttgccactaatgtccaggtgagatcaaggtcttcgactttagtacgatccgagaaaccgaacttacgcaatacatcagtacggaacattccgcaggcaccgctgataataaacggtgcgccgcccaggagctgctgtagcgtgcgcttcataacaatcatcggcaactttacggtcgcgcggatgtgcggtaacagccccgcgcctttcaacgcagtagagggaatgccgcctacggcatcagcaccgcgctcaatttctgccagcatatagcccattccgtcttgatcgggcggaacataggtgtcggcatcacttaaaaaaacctggtcgcaggtggcataattgaggccattcatcagcgcaccacctttaccggtatttttttgcgtgacggcaacaaagcggtcgccccatttgcgtttgacttccgccatgaccgcttcggtattgtccgtggagccgtcgttaacgcaaattacccggcaaaaataagggttacgcagtagattatccagtgactgcgccagacacgggccttcgttatacgcaggtataatggcgtcaatacagcctttcttttgactgggtttacgtcttagcgtacttaaaaaccatagcaacattgctatggacatacagataaatatccaggttttcatgcaatttgctcaaagaatcattttatgaattacaaagccttcacccagatcgctattgacctgttgcccgcgaaattgtgcaactgcacgcaggcgatcatgacgcatataatcgcgtcgttcctggcttttatgtttttttaatgcagcaagtttgactgtgaaatattcttctttaacggattcaaaaacctgaggcataaatgaaagccaggtacttggggtttcgtagccgagaatttgtggaatagtgcggcaggcaaccattgaagcttgataaacagcgagatgatcctgatggcggtcggcatcatgcatggtatatacccgcatgatttcaacatcagaaggaatttgatttttaatgatgtcttccagggcggaaatcatatcattgagctgtaaatgagcgcgggtgtcagcaaaattaagatgaatagtttggtggcaccctaatatctttagggcgttgcgcgattcttcatggcgatcgattattccatctgtgccagagttgccggtagtcatcaccacggctgcgatataaattcctttttgcgcaagacgagcaagcgatgcgccacagcctaattctatatcgtcaggatgtgcgccaatagcaaggataccctttcttttatttgccgaagaaaggagggctgaatctaaaaccttatccacttaatgacactccattttatttattatactacaagcacaacgatgcactcagagacgtaatctctggcgcagccagatgttaatttataaatgttaaatgttgctaataactgaaaagcaagggctttcagacccgcgggttcgactgggtaatgtttctatgcaattcatatgttaagtgtttgtatgtttggtatgtatagttattttgttttatacattgtatttagatgtgatttagtttgtcaattaattgcatttaaaaaatatgttctgtgaacaagcattgtttatatacattatgtgaatgtaatatgcgagtgattgagaatgatacagtgatatatacaatgcgaatataatagttttattatatgtattgatattgatagaaataatgaagtaataaatctcgtaatgtggttgtttatgcatcactaaaatgaagtgtagtaattttcccaattgttagaacggagtaattgcatatttaatctttccttagccgtttttttgctaagaataaaatcatctgtgcgataacgactaattcttttaatgaatgtttttattcctgaatactgctcccataacaagacaggggagcagacaatcatggcaatttcatcgcgaaacacacttcttgccgcactggcattcatcgcttttcaggcacaggcggtgaacgtcaccgtggcgtatcaaacctcagccgaaccggcgaaagtggctcaggccgacaacacctttgctaaagaaagcggagcaaccgtggactggcgtaagtttgacagcggagccagcatcgtgcgggcgctggcttctggcgacgtgcaaatcggcaaccttggttccagcccgttagcggttgcagccagccaacaggtgccgattgaagtcttcttgctggcgtcaaaactgggtaactcagaagcgctggtggtaaagaaaactatcagcaaacccgaggatctgattggcaaacgcatcgccgtaccgtttatctctaccacccactacagcctgctggcagcgctgaaacactggggcattaaacctgggcaagtggagattgtgaacctgcagccgcccgcgattatcgctgcatggcagcggggagatattgatggtgcttatgtctgggcactggcggttaacgccctggaaaaagacggcaaagtgctgaccgattctgaacaggtcgggcagtggggtgcgccaacgctggacgtctgggtggtgcgcaaagattttgccgagaaacatcctgaggtggtgaaagcgttcgccaaaagcgccatcgatgctcagcaaccgtacattgctaacccagacgcgtggctgaaacagccggaaaacatcagcaaactggcgcggttaagcggcgtgcctgaaggtgacgttccggggctggtgaaggggaatacctatctgacgccgcagcaacaaacggcagaactgaccggaccggtgaacaaagcgatcatcgacaccgcgcagtttttgaaagagcagggcaaggtcccggctgtagcgaatgattacagccagtacgttacctcgcgcttcgtgcaataaaaggaggcgcagatgctgcaaatctctcatctttacgccaattatggcggcaaaccggcactggaagatatcaacctgacgctggaaagcggtgagctactggtggtgctggggccgtccggctgcggtaaaaccaccctgctgaatctgattgccggttttgtgccttatcagcacggcagcattcaactggcgggtaagcgtattgaggggccgggagcagagcgcggcgtggtttttcagaatgaagggctgctaccgtggcgcaatgtccagaacaacgtggcgttcggcctgcaactggcaggtatagagaaaatgcagcgactggaaatcgcgcaccagatgctgaaaaaagtggggctggaaggagcagaaaaacgctacatctggcagctctccggcggtcaacgtcagcgggtgggcattgctcgcgcgctggcggcaaatccccagctgttattactcgacgaaccgtttggtgcgctggatgccttcacccgcgaccagatgcaaaccctgctgctgaaactctggcaggagacgggcaagcaggtgctgttgattacccacgatatagaagaagcggtgtttatggcgactgaactggttctgctttcacccggccctggccgcgtgctggagcggctgccgctcaactttgctcgccgctttgttgcgggagagtcgagccgcagcatcaagtccgatccacaattcatcgccatgcgcgaatatgttttaagccgcgtatttgagcagcgggaggcgttctcatgagtgtgctcattaatgaaaaactgcattcgcatcggctgaaatggcgctggccgctctcgcgtcaggtgaccttaagcattggcacgttagcggttttgctcactgtatggtgggcagtcgcagcgctgcaactgattagcccgctgtttttgccgccaccgcaacaggtactggcaaaactgctcaccattgccgggccgcagggatttatggacgccacgctgtggcagcatctggccgccagcctgacgcgcattgtgctggcgctactcgcggcggtggtaatcggtattccggtcgggatcgccatggggctaagcccgacggtgcgcggcattctggatccgataatcgagctttatcgtccggtgccgccgctggcttatttgccgctgatggtgatctggtttggtattggcgaaaactcgaagatcttactgatctatttagcgatttttgcaccggtggcgatgtcggcgctggcgggggtgaaaagcgtgcagcaggttcgcattcgtgccgcccggtcgctgggtgccagccgtgcgcaggtgctgtggtttgtcattttgcccggcgcgctgccggaaatcctcaccggattacgcattggtctgggtgtgggctggtctacgctggtggcggcggagctgattgccgcaacgcgcggtttaggttttatggttcagtcagcgggggagttcctcgcaactgacgtggtgctggcggggatcgcggtgattgcgattatcgcctttcttttagaactgggtctgcgcgcgttacagcgccgcctgacgccctggcatggagaagtacaatgagtgaacgtctgagcattaccccgctggggccgtatatcggcgcacaaatttcgggtgccgacctgacgcgcccgttaagcgataatcagtttgaacagctttaccatgcggtgctgcgtcatcaggtggtgtttctgcgcgatcaagctattacgccgcagcagcaacgcgcgctggcccagcgttttggcgaattgcatattcaccctgtttaccctcatgccgaaggggttgacgagatcatcgtgctggatacccataacgataatccgccggataacgacaactggcataccgatgtgacatttattgaaacgccacccgcaggggcgattctggctgcgaaagagttgccttcgaccggcggtgatacgctctggaccagtggtattgcggcctatgaggcgctctctgttcccttccgccagctgctgagcgggctgcgtgcggagcatgatttccgtaaatcgttcccggaatacaaataccgcaaaaccgaggaggaacatcaacgctggcgcgaggcggtcgcgaaaaatccgccgttgctacatccggtggtgcgaacgcatccggtgagcggtaaacaggcgctgtttgtgaatgaaggctttactacgcgaattgttgatgtgagcgagaaagagagcgaagccttgttaggctttttattcgcccatatcactaaaccggagtttcaggtgcgctggcgctggcaaccgaatgatattgcgatttgggataaccgcgtgactcagcactatgctaatgcggattacctgccacagcggcggattatgcatcgggcgacgattcttggggataaaccgttttatcgggcggggtaatacgagagtggacggtcccctcgcccccttggggagagggttagggtgagggggcgttcactgtactttcaacaggttaactccccctttctgagaggaaacaaaattaacgcagaatcttcttctcagccaaatccagcgcaaagtagctgaaaatcagatccgcacccgcacgcttaatcgaacctaagctttcgagcacgactttctcttcatctatagcacccgccagcgcggcgaacttaatcatcgcatactcaccgctcacctgatacgcgccaatcggcaattcagtacgttcacgcagctcacgcacgatgtcgaggtatgctccagcaggtttaaccatcaggcagtctgcgccctgggcttcatccagcagtgattcacgaatcgcctcgcgacggttcattgggttcatctgatagcttttgcggtcgccttttaatgcgcttccggcagcttcacggaacggaccataaaaggaagaggcgaacttggtcgaatacgacataatcgccgtatctttaaagcctgcagcgtccagcgcctggcgaatagcctgtacctggccatccatcgcggcggaaggggcgatgaagtctgcgcctgcagcagctgcaaccacggcttgcttgcctaaattttccagagtcgcgtcgttgtcgacgccatgctcgcacagcacaccgcagtgaccgtgagaagtgtattcacagaagcaggtgtctgacatgacgatcatttctggcacggtctgcttgcagatgcgcgacatacgcgccaccagtccatcttcccgccaggcatcgctgccggtttcatcggtatggtgagagatgccaaaagtcatcacggaacgaataccggcgttggcgatgcgttcaatttcgcgtgccagatgtttctctggaatgcgcatcacgcctggcatggcttcaacggctttgtagtcgtcaatttcttcttcaacaaagatcggcaacaccaggtcgttaaggctaagtgttgtctcttcaaacatagcgcgcagcgcaggagatttgcgcaggcgacgagggcgttggattaagtctgtcatggtctgcctgatgtttgtggaattaaggtgcacagtatacctgaagcggggcaggagtgttttacgaaagttgtcgcgatgttgacaagaagagaatgaaagagagaccaggacatcgttgtaatagaaatagcaataatttcatattcactgaaaatatttttaatctttattaatagctcttggttattattttgggagtttggttgccctgctataaattgaataattaaaactttgttgcatattgataggatatttatctggtttgtgtctgtgatatttgtgacgcgtatgtatcaaaaataacatcatctgcaacatattgaaatatggtgtttttatcaattcgatgcgtgtttttctccataaattatatatgtccacattcggacttaggggaaagaataattgaaccattcgtctgtaacacagcataatcgttagcgcgaaacataatatgttttctatgcattgataattgatggatcaacttattacgtccctgaggagggatgacaaatgcactcctggaaaaagaaacttgtagtatcacaattagcattggcttgcactctggctatcacctctcaggctaatgcaactacttataacacctggacttattacgacaatccaactactgctcttgactggagcaatatggatttaccgggtactgtagatggtaactatgtgaattatagtggctttgtctactataacaacacaaacggtgatttcgataccacctttaatggtgacactgttaacggggctatctctacatattacctgaatcatgattttactgatggaacaacaaaccagttgaacatcagcaactccctgattcatggttcaatcacttcaatgctgcctatgggtgaaagcagtgatggtcattatgtatatcagttctctgaatacggtactgatcgcgtaattgatgataattggcatgatggtgatgtattcactttaaatattgctaattctacaattgatgacgattacgaaggtttatacttcactgattcatatctgaatggtgacgttaccaaatatactaacgaaaccttccgtaccccagctggtgaaggtgaagaatacgccggtttgtttgcaaacggtggtgtcggtcttgggctggcagtgaatcttgatgtcgaaagtaacatcaatatttctaacaactcccgtgttgctggtatcagcctgactcagggtaataccgtaaacaatacttacactactgaatctcatacttgggataacaatatctcagttatcgattccacagtgacttcaggttctgtaactactctggaagacagtggtttctatggtaactctgcggaacctagtgattactctggtaagggcggagctaatgatgtagctctgtatttcagtgatagtgcggcttcaaattactccatgaaaaacaatgtttatttcagcaattctactctgctgggtgatgttgttttcgcaagtactttcaacgcaaacttctatccgcatggtcatgacagtaatgccgatggcgtactggacaccaatggtggctgggctgacgactcacttaatgttgatgaactgaatatcactctggataatggttccaaatgggtaggttcagcaactacatcagcgaatgttgacgttgactctactgtatcgactgactggtatgatgttacaggtaatagcctgtatccaggcgttgtagcagaagataatgcctggggtcgtacgattgataatcaagtattccagagcggtgtgtttaacgtcactctgaataatggttctgaatggaataccgttaacgcttcaaacattgatactttagctataaataatggctctgaagtcaatgttacgaattcttccttactttctgatactattggcttaactaatggctcttcactgaacattggtgaagatggtgaagttgctactgaccacctgacagttgatagctatagtactgttaatttaaccgaatctactggttggaataactattctaacctgtacgccaatactatcaccgtaactaacggtggtgtgctggatgtgaacgttgatcagttcgatactgaagctttccgtaccgataaactggaactgaccagcggcaacatcgctgaccataacggtaacgtagtatccggtgtgttcaatatccatagcagcgattacgttctgaacgctgatctggtgaacgaccgtacgtgggatacttccaagtctaactacggttacggtattgttgctatgaactctgatggtcacctgactatcaatggtaacggcgacgtagacaacggtactgaactggataacagctctgttgataacgttgttgctgcaaccggtaactacaaagttcgtatcgacaacgcaactggtgctggttctatcgctgactacaacggcaacgagctgatctacgtcaacgacaaaaacagcaacgcgaccttctctgctgctaacaaagctgacctgggtgcatacacctatcaggctgaacagcgcggtaacaccgttgttctgcaacagatggagctgaccgactacgctaacatggcgctgagcatcccgtctgcgaacaccaatatctggaacctggaacaagacaccgttggtactcgtctgaccaactctcgtcatggcctggctgataacggcggcgcatgggtaagctacttcggtggtaacttcaacggcgacaacggcaccatcaactatgatcaggatgttaacggcatcatggtcggtgttgataccaaaattgacggtaacaacgctaagtggatcgtcggtgcggctgcaggcttcgctaaaggtgacatgaatgatcgttctggtcaggtagatcaagatagccagactgcctacatctactcttctgctcacttcgcgaacaacgtctttgttgatggtagcttgagctactctcacttcaacaacgacctgtctgcaaccatgagcaacggtacttacgttgacggtagcaccaactccgacgcttggggcttcggcttgaaagccggttacgacttcaaactgggtgatgctggttatgtgactccttacggcagcatttctggtctgttccagtctggtgatgactaccagctgagcaacgacatgaaagttgacggtcagtcttacgacagcatgcgttatgaactgggtgtagatgcaggttataccttcacctacagcgaagaccaggctctgactccgtacttcaaactggcttacgtctacgacgactctaacaacgataacgatgtgaacggtgattccatcgataacggtactgaagggtctgcggtacgtgttggtctgggtactcagttcagcttcaccaagaacttcagcgcctataccgatgctaactacctcggtggtggtgacgtagatcaagattggtccgcgaacgtgggtgttaaatatacctggtaatattcttcactccgaagaaattctggtaatttaatctaaataatgcccgtcaaggatttgacgggcattactgcaaaggacgcgcaaatgttatctgtagttaaacctcttcaggaatttggtaagctcgataaatgtttgtccagatacggtacgcgcttcgagtttaataatgaaaagcaagttatattttccagtgatgtcaatagcgaagatactttcgttattttagagggcgttatctctctgcgtagagaagaaagcgtacttatcggtattacccaggctccttatattatggggctggctgatggtttaatgaaaaacgatataccatacaaattaatatcagaaggaaattgtacgggatatcatctaccagccaaacaaaccattacgcttattgaacaaaatcaactctggcgagacgctttttactggttagcctggcaaaatagaattctggaattacgcgacgtgcagctcattgggcataattcctacgaacaaatccgcgcaacattattatcaatgattgactggaatgaagaattgcgatcacgtattggtgtgatgaattatatccatcaacgtacacgcatatcgcgttctgtcgtcgcagaagttctcgctgctttgcgtaaaggcggctatatcgaaatgaataaaggcaaactggtcgctatcaaccgtttgccttcagagtattaatcaggatgcggggataaccaacggtttattcccgcttagctcggtcaccagatcattgatgccatcgctcatatttttaaagcgcgtcaacggcgaacgagtgaccaccacaaacgcgccaatattcttctgcgggatcatcgccatataggtaatgaaaccgccaccaccgcctgtcttctgaataatccccggacgaccctctttcggggccatatatacccagcctaaaccaagcgcatccgctttgccggggacatccatgccaatcactttcgtaaactgcgcgcgcggataaatcaacgtctgcatgcgatctgcctggttactgcgctgataaaaatcagatgacaaatactgctgcatccagcgcatcatatcgccaggcgtggaatagacgccgccgctgccaattgccgccagcgtgttattgcacggactggcaccgcgctcagcaaccattaaacggcggcactgatccggtgagggggtgtaggtggtgtctttcatccccaatggacgggtaatctgctcttcaaacaactgggtataaggcttgccggacgcattcgccagtgcatctgccagcaggtcgaacgcaaggttagagtacgccgcctgactgcctggcgcggctttcagcttcgccgtagaaaggtatttccagcgttgctcgcgcgttggccagacaaacaccggacgatgtgccgcgccaccgggctgttcacggggcagggcgctggtatgggttgccagattcactagggtaatgggcgtcccattgtaggtcggcacgcgtgcgcctggcggagcatatttacttagcggatcgtttaactttacggtcccctggtcgagcaatttcaccagcatttcactggtcattagtttggtgagggaagcaatacgcacgaccgaatccagctgcgggcgaacgttattaccaggtcgcgtttcgccataactacgaaagacgcgctggttaccgtcgataacaaccagcgccatccccgtggcaccgctgccgtaaaaaatatgatcggcataacgatcgacaatatcagaggcaaactccggttcagtgatcggctgcgccgcatggacggaggtcaatgacgccgcacacagcacggcagaaaaaagcagactacgtttcaacggtggtgtccataaattgaatgaaggtaactgagcgtatttatactactcattgatggattgcaaagggcgaattagtgcaataatagtgttaaaaacgtaacggcgcgtaaacacgatctttttcctgctcaccaatgcctgcatttgtgatcctgcgcgtgttaatccgcttatgtaaacaatctttggtttgtgaaatccgtcgaaacaattcttatggtcaggctggcgaactaagcaccttgctatgggtcacaatgggcggtttcatttggctgacgctttgtagtggtcatgcggttaatacacagcagttgttaaaacgataagaagttagcaggagtgcatatgtttaagtcttttttcccaaagccgggagcgttttttctctcggcctttgtttgggcattgattgccgttatcttctggcaagccggtgggggagactgggtggcgcgtatcactggcgcttccgggcagatcccgattagcgccgcgcgtttctggtcgttggatttcctgattttttacgcttactacattgtttgcgtaggactttttgcatttttctggtttatctacagcccgcaccgttggcaatactggtcaatactcggtactgcactgatcatcttcgtcacctggtttttggtggaagtcggggtcgccgtcaacgcctggtatgcaccgttctatgatctgattcaaaccgcgctaagttcgccgcataaagtcactatcgaacaattttaccgcgaagtgggcgtctttctggggattgcgctgatcgctgtggtgatcagtgtgctgaacaacttctttgtcagtcactacgtgttccgctggcgtacggcgatgaacgaatattacatggcgaactggcaacaactgcgtcatatcgaaggggccgcacagcgtgtgcaggaagacaccatgcgttttgcttcaacgctggagaatatgggcgtcagttttatcaacgccatcatgacgttgatcgccttcctgccggtgctggtaacgctctccacgcatgtgccggagctgccgattatcgggcacattccgtatggtctggtgattgccgctatcgtctggtcgctgatggggaccggattgctggcagtggtagggatcaaactgccggggctggagtttaaaaaccagcgagtagaggccgcctaccgtaaagagctggtttatggtgaagacgatgccacgcgtgcgacgccgcctacggtacgcgagctgtttagcgccgtgcggaaaaactatttccgcctctattttcactatatgtatttcaacatcgcccgcattctctatttgcaggtcgataacgttttcggtttgttcttgctgtttccgtcaattgttgccggtacgattacgctcggcctgatgacgcagattaccaacgtttttggtcaggttcgcggtgctttccagtacctgattaactcatggaccacactggttgagttgatgtctatctacaaacgtctgcgcagctttgaacatgaactggatggtgacaaaattcaggaagtaacccataccttgagctaaaaaggagaagtaatgtcgcgcgtcaatcctctatcttcgctgtcattgttggcggttctggttttagcggggtgtagtagtcaggctccgcaaccgttgaaaaagggcgaaaaagcgatagatgtggcgagcgtcgtgcggcagaagatgcctgcgagcgtgaaagaccgcgatgcctgggcgaaagatctcgccaccacctttgaaagtcaggggctggcaccgacgctggaaaacgtctgctcggtgctggcggtggcgcagcaggagtcaaattatcaggcagatccggccgttccgggcttaagcaagatcgcctggcaagagattgaccgtcgtgctgaacggatgcacattcctgcttttctggttcataccgcgctaaaaatcaaatcgccaaacggcaaaagttatagcgaacggttagattcggtgcgtacagaaaagcaattgagcgcgatttttgacgatctgatcagcatggtaccaatggggcagacgctgtttggttcgcttaatccggtgcgcaccggtgggccgatgcaggtcagcattgcttttgccgaacagcataccaaagggtatccgtggaaaatggacggtacagttcgtcaggaagtcttcagtcgccgcggcgggttgtggtttggtacttaccatttactgaattatcccgccagctatagcgcaccgatataccgctttgctgattttaacgctggctggtacgccagccgtaatgccgcgtttcagaacgcagtcagtaaggccagcggcgtgaagctggcactggacggtgatttaattcgttacgacagtaaagaacccgggaaaaccgaactggcaacgcgcaaactggcgggaaaactggggatgagcgacagcgaaattcgccgtcagttagagaaaggtgacagcttctcttttgaggagacggcgctgtacaagaaagtttatcaacttgccgaagcgaaaacgggtaaatcactaccccgcgaaatgttgcctggcattcaactggaaagcccgaaaatcacccgcaacctgactacggcctggtttgcgaagcgcgtagacgaacggcgggcgcgttgtatgaaacagtgatcaaacaggaatgtcatgccagataaggcgttttaggccgtatctggcaacgtaaatcttactggcggcgatgtcgccagtgcagccatagcgccaccactgcaaaaatgaggcagcctactaaaaacgggatcagcccgaaaatggtgccgacacctaaaccaatttccacccgtgggcgacctgtttcctggacctgcattaaacgctcatagacgccgggcgcatgcactaacaggttcagcaattgcgccccagcccaaaagcaaaacagcacaaacaacgcataggcaatgttgccaggcgttgaagaggcattgcgatattttccgctaaacagcgattttgacagggtgaaatcagccataaaaacctccggaagtcatctgcttctcttctggtgtgataccagcggcttatggcaagtctgacaggtcatttagattgtcaatatcagaatcatggtaaattgatgttgggaatattcccgaagcgtgaatcttcgttgtgagtcacaaaatggcaaccttaagttaaatttattaacaattacgaaaatgttgtctacaccacagacggttgttacagaatatgcaaggatgttgtttttcgttaacggagctgccatgaatctgcctgtaaaaatccgccgtgactggcactactatgcgttcgccattggccttatattcattcttaatggcgtggtggggttactgggatttgaagcaaaaggttggcagacctatgccgtcggtctggtgacgtgggtgattagtttctggctggcggggttgattattcgtcgtcgcgatgaagaaactgaaaacgcccaataagaatattatcgggcgttaaaatattacattgtggttttcaatgcgttatccgcagcgtgacgctccagcgccagctcaatcaaacgtgtgatcagatcggtgtaacccagaccgctggcttgccacagcttcggatacatactgatgttggtgaagccaggcagtgtgttgatctcgttgatcaccacttcgttctctggggttaaaaacacgtctacacgcgccatgcctgcgcatcccaacgtctgataagcctgaacggcaatcgcccggatcttatcgttgatctctggtgcaatggctgccggaactaccactttcgcgccatcttcgtcaatgtacttggtgtcgtaggcatagaagtcgctggtgagtacgatctcgccacaggtgctggcttgcgggttgtcgttgcccagaactgcgcattcgatctcacgacctttgatcccttgctcaacgatcactttatgatcgaattcgaacgccagatcgacggcaattgcgtactgttcttcactggttattttgctgacaccaacagaagagccctgattagccggttttacaaacagtggtaaccccagtttagactccacttcggcaaaactgatgttgtgacgattagcgcgcgtcagggtaataaatggcgcaatgttcagcccggcatcgcgtagcagacgtttggtgacatctttatccatacaggctgctgaagccagaacatcagaacctacaaacggtaaattggcgacccgcagcattccctgcaaggaaccatcttcgcccagcgtaccgtggacaatcgggaaaatgacatccaccgtcggcaacggctgaccgttttgcgcgtcgataagctgatgctcatgtttacctggcacctgcgcaaggctggtcgccgaagggcgcaacgcaatatgggcaggatcgtctgcatttagcagataattgctggcatcgctgacgtgccattgcccttgtttatcaatgcccagcagcacaacgtcgaagcgacttttatcaatggcatcgacaatgttttttgccgattgcagagacacttcatgttccgctgatttaccaccaaaaacgattcctacccgcagtttttccatcttaaaaacctatcccgtctaacacaaagtgcatacattaccacgacaaaacgggggattcgcggccttctgaaagattgttgcaatcttctgctgacaaagcgtgcaacgtactggtgaagaaagtgcgttatctcaaagatgtgcgcaagatcacaaaaatgatgaacgggaagctaatttattcctggcttaaatggccatgcggtgagtttttttctcttaattataagttaacgaagagaatatatttcataacttttatttataataaaggttgataattaaaagcctatattttgtgtgggtagttatttaaataagagaaacgtttcgctggtaatcaaacaaaaaatatttgcgcaaagtatttcctttgtcataaaaataatacttccagacactatgaagttgtgaaacataatgttaacttctccatactttggataaggaaatacagacatgaaaaatctcattgctgagttgttatttaagcttgcccaaaaagaagaagagtcgaaagaactgtgtgcgcaggtagaagctttggagattatcgtcactgcaatgcttcgcaatatggcgcaaaatgaccaacagcggttgattgatcaggtagagggggcgctgtacgaggtaaagcccgatgccagcattcctgacgacgatacggagctgctgcgcgattacgtaaagaagttattgaagcatcctcgtcagtaaaaagttaatcttttcaacagctgtcataaagttgtcacggccgagacttatagtcgctttgtttttattttttaatgtatttgtacatggagaaaataaagtgaaacaaagcactattgcactggcactcttaccgttactgtttacccctgtgacaaaagcccggacaccagaaatgcctgttctggaaaaccgggctgctcagggcgatattactgcacccggcggtgctcgccgcttaacgggtgatcagaccgccgctctgcgtgattctcttagcgataaacctgcaaaaaatattattttgctgattggcgatgggatgggggattcggaaattactgccgcacgtaattatgccgaaggtgcgggcggcttttttaaaggtatcgatgccttaccgcttaccgggcaatacactcactatgcgctgaataaaaaaaccggcaaaccggactacgtcaccgactcggctgcatcagcaaccgcctggtcaaccggtgtcaaaacctataacggcgcgctgggcgtcgatattcacgaaaaagatcacccaacgattctggaaatggcaaaagccgcaggtctggcgaccggtaacgtttctaccgcagagttgcaggatgccacgcccgctgcgctggtggcacatgtgacctcgcgcaaatgctacggtccgagcgcgaccagtgaaaaatgtccgggtaacgcgctagaaaaaggcgggagaggatcgattaccgaacagctgcttaacgctcgtgccgatgttacgcttggcggcggcgcaaaaacctttgctgaaacggcaaccgccggtgaatggcagggaaaaacgctgcgtgaacaggcacaggcgcgtggttatcagttggtgagcgatgctgcctcactgaatgcggtgacggaagcgaaccagcaaaaacccctgctaggactgtttgctgacggcaatatgccagtgcgctggcaaggaccgaaagcaacgtaccacggcaatatcgacaagcccgcagttacctgtacgcctaatccgcaacgtaatgacagcgtaccgaccctggcgcagatgactgataaagccattgaattgttgagtaaaaatgagaaaggctttttcctgcaagttgaaggtgcatcaatcgataaacaggatcacgctgcgaatccttgtgggcaaattggcgagacggtcgatctcgacgaagccgtacaacgggcgctggaattcgctaaaaaggatggcaacacgctggtcatagtcaccgctgatcacgcccacgccagccagattgttgcgccggacaccaaagcgccgggcctcacccaggcgctaaataccaaagatggcgcagtgatggtgatgagttacgggaactccgaagaggattcacaagaacataccggtagtcagctgcgtattgcggcgtatggcccacatgccgccaatgtcgttggactgaccgaccagaccgatctcttctacaccatgaaagccgccctggggctgaaataaaaccgcgcccggcggtgaattttcgctgtcgggtggtttttttgctgttagcaaccagacttaatggcagatcacgggcgcaaacgctcatggttaaaacatgaagagggatggtgctatgaaaataacattactggttaccttgcttttcggactggtttttttaaccaccgtcggcgctgccgagagaaccttaaccccgcaacaacagcgtatgacctcctgtaatcagcaggcgacggcgcaggcgttgaaaggggatgctcgtaagacctacatgagtgattgcctgaagaacagcaagtctgcgcctggtgaaaaaagtttgacgccacagcagcaaaagatgcgcgaatgtaataatcaagcaacgcaacaatctctgaaaggtgatgatcgtaataagtttatgagtgcctgcctcaagaaagccgcctgatacctgatagtgctaacgggtgagctacgaaagtggctcacccgaaatttcatacttctgcctttagccccgtctctataatttgggaaaattgtttctgaatgttcccaaaaataatgaatgatgaaaactttttcaaaaaagcggcggcgcatggggaggaacctcctttaactcctcaaaacgaacatcagcggtccgggctgcgcttcgcccgtcgcgtcagactaccccgtgcggttggcctggctggcatgttcttaccgattgcttcaacgctggtttcgcacccgccgccgggctggtggtggctggtgttggtcggctgagcgtttgtctggccgcatttagcctggcagatagcgagcagggccgtcgatccgcttagccgggaaatttacaacttaaaaaccgatgcagtattagcgggaatgtgggtaggcgtaatgggcgtaaacgtgctgccttccaccgcgatgttgatgattatgtgtctgaatttgatgggggcaggcggcccccgtctgtttgtcgcgggtctggtgttgatggtggtttcctgccttgtcaccctcgagctgacgggcattaccgtgtcgttcaatagtgcgccgctggaatggtggctctcccttcccattattgtcatttatcctctgctgtttggctgggtcagctaccagacggcaaccaaactggcggaacataaacgcaggttgcaggtcatgagtacccgcgacggcatgacgggcgtgtataaccgacgtcattgggaaactatgttacgcaatgaatttgataactgtcggcggcataatcgcgatgcaacgttactgattatcgatatcgaccatttcaagagcatcaacgatacctggggccatgatgtgggcgatgaagcgatagtggcgcttacccgacagttacaaattaccctgcgcggtagcgatgtgattggtcggtttggcggcgatgagtttgcagtaatcatgtccggtacgccagctgagagcgctattaccgccatgttacgagtgcatgaagggctaaatacattacgtttgccgaatacgccacaggtaactttacggattagtgtgggggttgcgccgctgaacccacaaatgagtcactatcgtgagtggttgaaatcggcagatttggcgctttacaaagcaaagaaagccggacgtaaccgcaccgaagtggcggcctgacgtccggcgaaagtcatcaggatttgctgagtttttctgatttttccatacacttcgtcatcgcttcgatcactgcagcacggaagcctttctcttccagtacgcgtaccgcttcaatggtggtgcctcccggtgagcagaccatatctttcagtgcccccggatgttctcccgtttccagcaccatttttgcggaacccattactgcctgagcggcaaatttatacgcctgggcgcgtggcatcccgcccagcacggcggcgtcggccatcgcttcgataaacataaatacgtaggctggcgaagaaccgctcacaccgaccaccgggtggatcatcggctcagcaattacttccgcttcgccaaagcagcggaaaatattcagcacatcagcggtatcttctggggttaccagcgcgtttggcgttaccgaggtcatcccggcattaaccagcgcgggagtgttcggcatggcgcggataattttccggtcatggcccagcgcgcgggcaagctggtcgagcgtgacacctgcagcaatagaaacgaccagagagtctttattcaggctggaggtgatttcgctaagcactttaatcatgatgccaggtttaacggcagcaaaaatgatatcggcgatttgcgccacttcttgcgccgattctgcggcgttgatgccgaactggtcatgcagggcggcaactttatccggggagggggtgtatacccagatttgccctggaagcacctgaccgctggcaatcagaccgccgagaatggcttttcccatattgccgcagccaataaaaccgattttcttttccattgcctcactcctgccgtgaaattcattgttttgataatcgctggcagaagcataaacagaactatgccggaaggcaaaagcgcgacacaatagaggattacccaacaaaggatgactttatgacaatttgggtggatgccgacgcgtgtcccaatgtaattaaagagattttgtatcgcgcggcggaacgtatgcagatgccgctggtactggtagcaaaccagagtttacgcgtgccgccatcgcgatttattcgtacgctgcgcgtcgcggcaggtttcgacgttgccgataacgaaattgtccggcagtgtgaagcgggcgatttggtgatcaccgcagatatacctttggctgctgaagccatcgagaaaggcgctgcggcgattaatccgcgcggcgaacgttacacgccagcgaccattcgtgagcgcctgacgatgcgcgattttatggataccttacgtgccagtgggatccagaccggcggaccagaaagtctttcacaacgtgaccgccaggcctttgctgcggagctggagaaatggtggctggaagtgcaacgtagtcgcggccaaatgtaatttattatttacacttcattcttgaatatttattggtatagtaaggggtgtattgagattttcactttaagtggaatttttcctttacaatcgaaattgtactagtttgatggtatgatcgctattctcatgacaccggctttcgccgcattgcgacctattggggaaaacccacgatgacacaacctctttttctgatcgggcctcggggctgtggtaaaacaacggtcggaatggcccttgccgattcgcttaaccgtcggtttgtcgataccgatcagtggttgcaatcacagctcaatatgacggtcgcggagatcgtcgaaagggaagagtgggcgggatttcgcgccagagaaacggcggcgctggaagcggtaactgcgccatccaccgttatcgctacaggcggcggcattattctgacggaatttaatcgtcacttcatgcaaaataacgggatcgtggtttatttgtgtgcgccagtatcagtcctggttaaccgactgcaagctgcaccggaagaagatttacggccaaccttaacgggaaaaccgctgagcgaagaagttcaggaagtgctggaagaacgcgatgcgctatatcgcgaagttgcgcatattatcatcgacgcaacaaacgaacccagccaggtgatttctgaaattcgcagcgccctggcacagacgatcaattgttgattttcgagcgcctatacttaacgttcatcccgtgaaataaggaagaacgatgccaacgaaaccgccttatcctcgtgaagcatatatagtgacgattgaaaaaggaaagccaggacagacggtaacctggtaccaactcagagccgatcatcctaaaccagactcgttgatcagtgaacatccgacggctcaggaagcgatggatgcgaaaaaacgctatgaggaccctgacaaagagtgaccgcatcagactgctcggaagggattctgagtgccactacaagggatctgcgtcacatttttcataattcatgtttttcaaataattagaatattaaacaataacaatccattactggaatcatttggaatctttacattatgccgtgcacgtctgctgctacgctttttgtcatttgtagcacaagtaagtgtcagcagtggtgcttaacacttgcccggtaattaacgacgaaataaaagtaaggtggaagaacaatgagtgcgtcgttggcgattctaaccatcggcattgtacctatgcaggaagttttgccgctcctgacagaatacattgacgaagataatatttcccatcatagcctgctggggaagttaagccgcgaagaagtgatggcggagtacgcgccagaagcaggcgaagacacaattctcacattattaaatgacaaccatctggcccatgtttcgcgtcgcaaagtagagcgtgacctgcaaggtgtggttgaagtgctcgataatcagggctacgacgtcattatattaatgagtacggcaaacattagtagtatgactgcgcgtaatacgatctttcttgagccgtcgcggatattgccaccgctggtttcctctattgttgaagatcatcaggtaggggttatcgtaccggttgaggagttgctgaccgttcaggcgcaaaaatggcaaattttgcagaaaccgccggtattttcattgggtaaccccattcatgattcagaacaaaaaatcattgatgccgggaaagaattactggcaaaaggggctgatgtcatcatgctggattgtttgggatttaaccagcgtcatcgcgatttactgcaaaaacagctcgatgttcctgtcttgctctctaacgtattgattgcacggctggctgcggaattactggtgtaattttgcgtgacagccagcgcctctggcccctatagtgaagtagatgttcaactaccagacagggccagtttatgcttcaaagtaatgagtacttttccggcaaagtgaaatcgatcggcttttccagcagcagcactggtcgcgccagcgtgggtgttatggttgaaggcgaatacaccttcagcaccgctgagccggaagagatgacggtaatcagtggcgcgctgaatgtgttactgcctgacgcgaccgactggcaagtgtatgaagccggttcggtgtttaatgttcccggtcacagtgagtttcatctgcaagttgccgaacccacctcttatctgtgccgctatctgtaattcctcgccttccccttgaacgggagggcatttttctgaaatatcctttctttaacccataataatatttcctttgctgcgattttttcaatttccgatatattcataatttatcaaggttgatataaatatcagtgaagatctccagatattgttgcggaactggctacgataaaagataaatcagatgatgaatggtggcgtgcattgctgcaaagtcgcaatgatcatttacgccaaacggcattgcgcaacgcacataccccggcgttgttgttaacgacattgactgagcctcaggatcggtcgctggctattaataatccacagctggctgccgatgtgaaaacggcgtggttaaaagaggatccatcattactcttatttgtcgaacaacccgatctttcgctgttacgtgatttagtgaaaaccggggcaacgcggaaaattcgcagtgaagcgcgtcaccggcttgaggaaaaacaatgacacaacgtccatggagcaagttacagcgtaaaacgcataatattgctgcgctaaaaattattgctcgccgtagcgaataattatatgcctggtgtggcttcgtacgccggataagacgcggcaggcgtcgcatccggcattaaaggaaaatcagcaattaacgttgtgcttcgccacctaatccttcaatcaggttttgaattaacgctgccagttcaccagtcatcaggatgaaatcggcatcaaaacgctgggcgaaatcttcacggtcgatatcttcgttttgatcgcgcagctcgtcgcagaacttcagacgcttgagcgaaccatcgtcgcacatcacaaactgaatgcgctgctgccagtcgagcgccagtttagtcaccacttttccggcttcaatgtgattggtgatctcttcgctggtcagatcttgtttcttcgcgcggatcacgccgccatcttccagcaacgatttcagctcggcttcatcaagcagctggaagccctgtgccgcactaccggagcgaacccattcggtcagcgtcagttcaatcgggttttccatgctcaatggtacaaccggtaacgaccccaggcttttacgcagtaatgccagcgtatcttccgcttttttggcactggcgcagtccaccataatcaaaccgttaaccgtgtcgatccacatcattgtctggctaaaacggctgaaagcacgcggcagcagagagtgcagcacttcgtctttcagcgaatctttttcggttttcttcagcttacgcgcctgttccgcttccagtttggcgattttcgcttccagcgcctgtttaatcaccggagacgggaggattttttcttctttgcgcgcgcagataacaatttgaccattggcaacgtgcgttaacgcatcgctgtgcgatcccatcggaggaacccagcccatcttcgccatgtcctggctgccgcatggggtaaatgccatcgaggctagctgtttttccatctcttctgcacgcagcgaaatctcgcggctaagacggtaaaccattaaatttttgaaccacagcatgataatttccacggccttgtcgttaaatttagcgggcatgataacgaattgtcggcggccttgcattgccaatccggttgtccgtctctacgctattgatattgaaaaaaataaggagagtaccgtgcgtataggtatcgatttaggcggcaccaaaactgaagtgattgcactgggcgatgcaggggagcagttgtaccgccatcgtctgcccacgccgcgtgatgattaccggcagactattgaaacgatcgccacgttggttgatatggcggagcaggcgacggggcagcgcggaacggtaggtatgggcattcctggctcaatttcgccttacaccggtgtggtgaagaatgccaattcaacctggctcaacggtcagccattcgataaagacttaagcgcgaggttgcagcgggaagtgcggctggcaaatgacgctaactgtctggcggtttcagaagcagtagatggcgcggcagcgggagcgcagacggtatttgccgtgattatcggcacgggatgcggcgcgggcgtggcattcaatgggcgggcgcatatcggcggcaatggcacggcaggtgagtggggacacaatccgctaccgtggatggacgaagacgaactgcgttatcgcgaggaagtcccttgttattgcggtaaacaaggttgtattgaaacctttatttcgggcacgggattcgcgatggattatcgtcgtttgagcggacatgcgctgaaaggcagtgaaattatccgcctggttgaagaaagcgatccggtagcggaactggcattgcgtcgctacgagctgcggctggcaaaatcgctggcacatgtcgtgaatattctcgatccggatgtgattgtcctggggggcgggatgagcaatgtagaccgtttatatcaaacggttgggcagttgattaaacaatttgtcttcggcggcgaatgtgaaacgccggtgcgtaaggcgaagcacggtgattccagcggcgtacgcggcgctgcgtggttatggccacaagagtaaaaaacgtaggcaattggcgcatcatgcctgatgcgacgcttgccgcgtcttatcaggcctgcaaaatgtgccagaaccgcgtagggcggataaggcgttcacgccgcatccggcaataagtgctccgatgcctgatgcgacgcttgtcgcgtcttatcaggcctacaaaatgtgccagaaccgcgtagggcggataaggcgttcacgccgcatccggcaataagcaacgcgcaccgtgacagtaatctaccccagtggtttcgccagcaccggactatccgccgcttgctggcgcttatagcgaccatacagcagcaacgatgacatcgcagcaaacgaaagcagggcggcaggcagcgccacgtaattatatgccagccccagcgtcagcatcatacctccgcaatatgcgccgacggcgctaccgaggttaaacgctatttgcccacctgcggcacctaataactctccgcctttggcattttgcagtaacaatatttgcagaggtgctgaaagggcaaataatcccgcgcaacaaataaaagcaaaaataagcgacgttgttttcatgccgccgcagaaaaagagcatcagcagtgccagtacaatgataaagtcagtcactgctgcaatgcgcagtggtgaataacgtcctgaaatcctgccacttagcatatttcccagcaccatccctagcccaactaacatcataataaaggtcatcgccgtttccgaaaaaccggaaataaacatcatgtatggctttacgtagctgaaccaggcaaacacacctgcgttgccaaacatcgtggcggcgaaaattaaccacggggccgggctgcgcaaaaagtgaaattgttcgcgcagctttcctttcgcctcgtcgcgaatatctggcacccaaaaatagaccgatgccatcaccgcaatattaaaaacagcgatcaataaaaaggtgtaacgccagctaaattcctgacttaaatacgttcccagcggaatgcccagcaaattggcgactgtcatcccggaaaccatccccgccacggcggcggtgacttttccgggtttgataatttttgataacacgatcgctccgacgccaaaaaatgcgccatgcggaaagccggataccagccgaccaatggcgagcatcaggtaagacgaagagagcgtgaacatggcgttgccaatgacgcacaacgccaccagaaacaacaagatatgtttgagtgagtagcggctggaaaagagtgcgatgattggcgcaccgaccaccacccccagtgcataatacgagatcatatgcccggcggcaggaatcgaaattcctacgttatgcgccagctccgtgagcacgcccataatgccaaattcggccatccccaaaccaaacgtgcccagagccaaagataaaatgacttttttcataccaccatcacaaccaccagaacggctaccaatcaccgtagccaataaagtgatagcttgcaggataacgaccagcaaggccaagagataattcgcccctctgtattcattatcctgctgaatagttatttcactgcaaacgtactttccagtttgctgtagcccaggccgttgatctttttcactttgatctgcaccggaatacgctctttcatcgcttctacgtggctaatcacaccgatggttttgccactggcgttcagggcatccagcgcatcaagggcggtatccagcgtttcgctatccagcgtgccaaaaccttcatcaaggaacagcgagtcaatacgtgttttatggctgaccagatccgaaagcgccagcgccagcgccagactaacgaggaaactttcgccgccggaaagggtacgggtatcgcgtaccgcatctgcctgccaggtatcaacaacctcgacttccagcgcctcgctggctttgcgctgtaacagatagcgcccgtgcagccgggtaagttgctgattagcgagatggactaaattatccagcgtcagcccctgggcaaacttgcggaatttatcgccctctttggaacctattagcgaattcagatatccccagtcctcaacctgctgcgtcatttgagcaatttgctgcattaaggtttgttgttgctgacggttatctgcatcctgcttcagctgctggcgaatctcgccttgactcgtggtgttttcacgcaacttttggtgagtttgcgctaactcttgctgaatctgctccaccgtcacagtgagagccaacccgtcaggtcggtgttgttgatgctgtgccagcgtttctgctgtctgagtgaccagcgtttgcgcctgacggcgctggttttccagattctgcttgagctgttccagctgcgttagtgtttgttcatccattagcgccgcaaggaacgcctgctgatcgtcaaagacgctggcctgtagcgcggtgtcaaactgcgcctgggctttttgcagactttgcgccgccagaacatcctgttgctgtaatgtctgctgctggctgtgtaatgcgagacattgttcatgaacctgccgccagttatccagcgccacagtttcttcgctgtgcgggagatcatcactttgcggcaacgtttccagaatcggcgtcagctgctgaatacggttttgcagcgcggttaattcgttctggcgttgctgccagctctgcgcttcttgctgacgtgtcgccaaccagctctcttcttcatcttcctgtggcaatgtcagtgcataacccgccaatgccgttaagagctgctgctggcgttgttcaatttgctgttgatactggataatttgctgattatgcgcggcaatctgcccttgtaattcatgtcgttggctgagtaaccgcagctggcgttcgtgcttatcttgtgcatccagccacggttgaatatcgtcctgtggctgcaaggtgatattgaggctggccgtgacggcttgccattgttgagtaagtgcttgctcatcttgtcggaggctttgcgcttcgttttcatcgcgctgaagctgcttcgttaatgcatccagttgcccgcgcagcgccgcaccttcttcgccgagctttttaacttcgttttccagcgccagtaatcgagactgattaacgccaggctccagcgcctgatacgcctcgaccgccggatggctggtggaaccacaaagtggacaaggctgacccgcctgtaactgtgcacgctgggcttccagcgttttgatgcgcgcttcctgctcgcaaatggttttcacatcggcaagttgctgcgtcttttctttataacgctggcgcatttcgttaagtgcgacattacgttgcgtctgttccagagtgacattctggatagcgacctgtaactgcgccagacgtttttgttggggaacaatctgcccatgcagcgcgaccaggcgctgacgcagtgggcgttgctcagcatgttgcgccagggcggtagcaacttcatcggcggttaacgtcaacgtgatcgccgcaagcgcattaagtttttgctcagcatgggttaactgttgctgccattgccgcagatgctcgcgatcgctggtttgttgggagaactgcgcacgccaacccgccagttcgttgttccactgacggaagcggtcgtgttcctgtaaccaggtattcaggctttgttgctgctgctgtaattctgctgactgcttcgccgcgtggtggcgaatgctcgcgcgaagcgccattgtgctctgtaagcgagtatttacttcttcaatctgctggcgaatatgcgccagcgccgcgctgtgttctgcgatgcgttcccagtgtggacgaagatttcgtgccggttgtgccagactaagcgccgccagttgaggttgcgctttttcttcttcggctaacgcctgttgcaaggcctgctgacggcggctggcttcttgctgcaattcgtcctgacgcgttaaccagtttagcgattgttgttcttgctgctgcgcggtaattaactgtttttcttcgtcagtaagtacctgcaaactcgctgtcagcgattgcacttgttccggcgtgagcaacgtgacgccgctggcctgcgcttgcagcttctccagctctgtgcgggccgatttgtgctgctcaaaaaccatcgccgagatttgcccgtagatttcagtgccggttaactcctcgagcaattccgcgcgttctttgggtttggcattcaggaaggcagcaaattgcccctgcgaaagcagcatcgaacgggtgaagcgcccgtaatccagcccggttaacgtcgctgtcagttccagcttatctttcactttgtcggcgagaattttgccgtcggcgcagcgcgccagctctacgcgtggcacctgcaaattaccgtcgggttggttacgcgcccgattctggctccagaatgcacggtacgcttcacctttcacttcaaactccacctccgccagacattcggcggtatcgcgggtcatgagatcattttgcgattgtgaaacgttagagagacgcggagtttcgtgatacagcgccagacaaatggcgtccagcagggtggttttccccgcacctgttgggccggtaatagcaaacagcccgttgctggcgaacggctcgcgggtgaaatcaatcttccattcgccttttaatgagttcaggtttttcaggcgcaggctgagaattttcatgcttcgtgttctccggcgagggtatgcaacgtcgtggtgaaaagatgctgcagacgttgctgctgcgattcatccagttcttccagtgccagacggcgattgaacacctcttcgacgctgagttcgctgagggtttcacgctgttggctggctaacacacgctcgcgctgttcacgactccgacgtaccagcaatacttcgacaggcaatgattcggttaatgcctggattttgcgatgaatatcatgcagatactcatcagtagtgatttcgatatccagccagacaggtggctcctgcgatacatcgcgccactgttccagctgtgcggtaatcgacgccagatcgcctttcagcactgccatgggttgcgttaccggtacgttcaggttttccacgctctctaatttgccgtttgaaaatgtcaccagatggacatatttactcttaccgcattcatcaaaactcagcggaatgggggagccgcaatagcgaacatgttccatgccgccaataatctgtgcgcggtgaatatgcccgagcgcgatgtagtcggctggtggaaagttttgtgccggaaacgcgtccagcgtgccaatataaatgtcacgcacggcgtcacttttactggcccccacggtcgttaaatgtcccgtggcgatgatgggcagaggctgatcgccgcgcagtttgcaggcatcggcatagtgttgttggtaataatcggtaatcgctgccagtaaatgctgctgtttttcaataccgttaagccccgcctggctggtaataatgtcacgcggacgtaaaaacggaatggggcacagcactgcgcctggcgtcccgtcgcgacgaggcaagatttgcggcgcatgtccggcgctggcgaccacggtagtattgaggaacgccatgatatcgcgcgattcattcagcgtggcgaccgagtcatggtttcctgccagtaccaccagatgacagccagtttgctgtaaattgacaacaaaacggttgtataacgtgcgggcgtaactgggcggcgagccggtatcgaaaacatcaccggcaacaataatcgcatccacctgatgggtttgtgctgtctccagcagccagtcaagaaaagcctgatgttcagcttcgcggcttttactgtagaagttctggccgagatgccagtctgaggtgtgaaggatgcgcataacggttccctggcgaaaaagcatgggcgcgattatacccaaacagatgtgccatttgcttttttctgcgccacggaaatcaataacctgaagatatgtgcgacgagcttttcataaatctgtcataaatctgacgcataatgacgtcgcattaatgatcgcaacctatttattacaacagggcaaatcatggcgagacgtattctggtcgtagaagatgaagctccaattcgcgaaatggtctgcttcgtgctcgaacaaaatggctttcagccggtcgaagcggaagattatgacagtgctgtgaatcaactgaatgaaccctggccggatttaattctccttgactggatgttacctggcggctccggtatccagttcatcaaacacctcaagcgcgagtcgatgatccgggatattccagtggtgatgttgaccgccagaggggaagaagaagatcgcgtgcgcggccttgaaaccggcgcggatgactatatcaccaagccgttttcgccgaaggagctggtggcgcgaatcaaagcggtaatgcgccgtatttcgccaatggcggtggaagaggtgattgagatgcagggattaagtctcgacccgacatctcaccgagtgatggcgggcgaagagccgctggagatggggccgacagaatttaaactgctgcacttttttatgacgcatcctgagcgcgtgtacagccgcgagcagctgttaaaccacgtctggggaactaacgtgtatgtggaagatcgtacggtcgatgtccacattcgtcgcctacgtaaagcactggagccaggcgggcatgaccgcatggtgcagaccgtgcgcggtacaggatatcgtttttcaacccgcttttaacgccttgctcatcggacgcagagcagggcttatgatttcttaactggagtatcttacgtgctggaacggctgtcgtggaaaaggctggtgctggagctgctactttgctgcttcccggctttcatcctgggtgcattttttggttacctgccctggtttttgctggcatcggtaacgggactgcttatctggcatttctggaatttattgcgcctttcatggtggctgtgggtggatcgtagtatgaccccgccaccggggcgtggtagctgggaaccgctactatacggcttacaccagatgcagctgcgaaataaaaaacgccgccgtgaactgggcaatctgattaaacgctttcgtagcggcgcggagtcgctgcccgacgcagtggtgctgaccacggaagagggcggtattttctggtgtaacggtctggcgcaacaaattcttggtttgcgctggccggaagataacgggcagaacatccttaacctgctgcgttacccggagtttacgcaatatctgaaaacgcgtgatttttctcgcccgctcaatctggtgctcaacaccgggcggcatctggaaattcgcgtcatgccttatacccacaaacagttgctgatggtggcgcgtgatgtcacgcaaatgcatcaactggaaggggcgcggcgtaacttttttgccaacgtgagccatgagttacgtacgccattgaccgtgttacagggttacctggagatgatggatgagcagccgctggaaggcgcggtacgcgaaaaagcgttgcacaccatgcgcgagcagacccagcggatggaagggctggtgaagcagttgctaacgctgtcgaaaattgaagccgcgccgacgcaattgctcaatgaaaaggttgatgtgccgatgatgctgcgcgttgttgagcgcgaggctcagactctgagtcagaaaaaacagacatttacctttgagatagataacggcctcaaggtgtctggcaacgaagatcagctacgcagtgcgatttcgaacctggtctataacgccgtgaatcatacgccggaaggcacgcatatcaccgtacgatggctgcgagtgccgcacggtgccgaatttagcgttgaagataacggaccgggcattgcactggagcatattccgcgcctgaccgagcgtttttatcgcgttgataaagcgcgttcccggcaaaccggcggtagcggattagggttagcgatcgtgaaacatgcggtgaatcatcacgaaagtcgcctgaatattgagagtacagtaggaaaaggaacacgtttcagttttgttatcccggaacgtttaattgccaaaaacagcgattaatccgcctttgtcatcttttattgccataagccagccgatgctggcttattttctttgcagtcaaaatacgggcgttagattttacaacggttggtgattttttgttcgcatgattagccatgtctttttcacggaaatagtgttttatactggttggtgatttcttatcgctatatacctctggtttttagatccctccttgctttaaaacgttataagcgtttaaattgcgcttcaggtgctgtcatactgactgcattaacgcggtaaatcgaaaaactattcttcgccgcgcctggttgggagtatttcccgctaaaattgtttaaatataccgctgtatcatccccagggattggcacaaaaatttaacgttacaacaccacatccacaggcagtatgatttatgacccatcaattaagatcgcgcgatatcatcgctctgggctttatgacatttgcgttgttcgtcggcgcaggtaacattattttccctccaatggtcggcttacaggcaggcgaacacgtctggactgcggcattcggcttcctcattactgccgttggcctgccggtattaacggtagtggcgctggcaaaagttggcggcggtgttgacagcctcagcacgccaatcggtaaagttgctggcgtactgctggcaacggtttgttacctggcggtggggccgcttttcgctacgccgcgtacagctaccgtttcctttgaagtggggattgcgccgctgacgggtgattccgcgctgccgctgtttatctacagcctggtctatttcgctatcgttattctggtttcgctctatccgggcaagctgctggataccgtgggcaacttccttgcgccgctgaaaattatcgcgctggtcatcctgtctgttgccgcgattgtctggccggcgggttctatcagcacggcgactgaggcttatcaaaacgctgcgttttctaacggcttcgttaacggctatctgaccatggatacgctgggcgcaatggtgtttggtatcgttattgttaacgcggcgcgttctcgtggcgttaccgaagcgcgtctgctgacccgttataccgtctgggctggcctgatggcgggtgttggtctgactctgctgtacctggcgctgttccgtctggggtcagacagcgcgtcgctggtcgatcagtctgcaaacggcgctgctattctgcatgcttacgttcagcacacctttggcggcggcggtagcttcctgctggcggcgttaatcttcatcgcctgcctggtaacggcagttggcctgacctgtgcttgtgcagaattctttgcccagtacgtaccgctctcttatcgtacgctggtgtttatcctcggcggcttctcgatggtggtttctaacctcggcttaagccagctgatccagatctccgtaccggtgctgaccgctatttatccgccgtgtatcgcactggttgtattaagttttacacgctcatggtggcataattcgtcccgcgtgattgctccgccgatgtttatcagcctgctttttggtattctcgacgggatcaaagcatctgcattcagcgatattttaccgtcctgggcgcagcgtttaccgctggccgaacaaggtctggcgtggttaatgccaacagtggtgatggtggttctggccattatctgggatcgcgcggcaggtcgtcaggtgacctccagcgctcactaaatcactgaacatttgttttaaccacggggctgcgatgccccgtggttttttattgtgttgatgggttaggaattgatggaaagtaagaacaagctaaagcgtgggctaagtacccgccacatacgctttatggcactgggttcagcaattggcaccgggctgttttacggttcggcagacgccatcaaaatggccggtccgagcgtgttgttggcctatattatcggtggtatcgcggcgtatatcattatgcgtgcgctgggggaaatgtcggtacataacccggccgccagctctttctcgcgttatgcgcaggaaaacctcggcccgctggcaggttacattaccggctggacctactgctttgaaatccttattgtcgccatcgccgatgtgaccgcttttggtatctatatgggtgtctggttcccgacggtgccgcactggatttgggtactgagcgtggtgctgatcatttgcgccgtaaacctgatgagcgtgaaggtattcggtgagctggaattctggttctcgttctttaaagtcgccaccatcatcatcatgattgtcgccggtttcggcatcatcatctgggggattggcaacggcgggcaaccgaccggtattcataacctgtggagcaacggcggcttcttcagtaacggctggcttggcatggtaatgtcgttgcaaatggtgatgtttgcttacggtgggatcgaaattatcgggattaccgccggtgaagcgaaagatcctgagaaatcgataccgcgtgcgattaactccgtgccgatgcgtattctggtgttctacgtcggtacgctgttcgtcattatgtctatctacccgtggaatcaggttggcactgccggtagcccgttcgtgctgacgttccagcatatgggcattacctttgccgccagcattcttaactttgttgtgctgactgcttcgctgtcggcaattaacagtgatgtatttggcgtaggccgtatgctccacggtatggcagagcagggcagcgcgccgaaaattttcagcaaaacgtcgcgtcgcggtattccgtgggttacggtgctggtgatgactaccgcgctgctgtttgcggtgtatctgaactacatcatgccggaaaacgtcttcctggtgatcgcttcgctggcaaccttcgccacggtgtgggtgtggattatgatcctgctgtcgcaaattgccttccgtcgccgtttgccgccagaagaagttaaggcgctgaaatttaaagtgccgggtggggtagcaacgaccatcggcgggctgattttcctgctctttattatcgggttgattggttatcacccggatacgcgtatctcgctgtatgtcggtttcgcgtggattgttgtgctgttgattggctggatgtttaaacgccgccacgatcgtcagctggctgaaaaccagtaatccttgcgttctgtaagccggttcaggaggaaatcctgatccggctattccgaaagttatccgcccccgtcctcctcccccaaatatccttcagatgatgagtgatcctgcattaggctatggcaaggtgatcagattttcatcacaggggaattatgatgttaaatgcatggcacctgccggtgcccccatttgttaaacaaagcaaagatcaactgctcattacactgtggctgacgggcgaagacccaccgcagcgcattatgctgcgtacagaacacgataacgaagaaatgtcagtaccgatgcataagcagcgcagtcagccgcagcctggcgtcaccgcatggcgtgcggcgattgatctctccagcggacaaccccggcggcgttacagtttcaaactgctgtggcacgatcgccagcgttggtttacaccgcagggcttcagccgaatgccgccggcacgactggagcagtttgccgtcgatgtaccggatatcggcccacaatgggctgcggatcagattttttatcagatcttccctgatcgttttgcgcgtagtcttcctcgtgaagctgaacaggatcatgtctattaccatcatgcagccggacaagagatcatcttgcgtgactgggatgaaccggtcacggcgcaggcgggcggatcaacgttctatggcggcgatctggacgggataagcgaaaaactgccgtatctgaaaaagcttggcgtgacagcgctgtatctcaatccggtgtttaaagctcccagcgtacataaatacgataccgaggattatcgccatgtcgatccgcagtttggcggtgatggggcgttgctgcgtttgcgacacaatacgcagcagctgggaatgcggctggtgctggacggcgtgtttaaccacagtggcgattcccatgcctggtttgacaggcataatcgtggcacgggtggtgcttgtcacaaccccgaatcgccctggcgcgactggtactcgtttagtgatgatggcacggcgctcgactggcttggctatgccagcttgccgaagctggattatcagtcggaaagtctggtgaatgaaatttatcgcggggaagacagtattgtccgccactggctgaaagcgccgtggaatatggacggctggcggctggatgtggtgcatatgctgggggaggcgggtggggcgcgcaataatatgcagcacgttgccgggatcaccgaagcggcgaaagaaacccagccggaagcgtatattgtcggcgaacattttggcgatgcacggcaatggttacaggccgatgtggaagatgccgccatgaactatcgtggcttcacattcccgttgtggggatttcttgccaataccgatatctcttacgatccgcagcaaattgatgcccaaacctgtatggcctggatggataattaccgcgcagggctttctcatcaacaacaattacgtatgtttaatcagctcgacagccacgatactgcgcgatttaaaacgctgctcggtcgggatattgcgcgcctgccgctggcggtggtctggctgttcacctggcctggtgtaccgtgcatttattacggtgatgaagtaggactggatggcaaaaacgatccgttttgccgtaaaccgttcccctggcaggtggaaaagcaggatacggcgttattcgcgctgtaccagcgaatgattgcgctgcgtaagaaaagtcaggcgctacgtcatggcggctgtcaggtgctgtatgcggaagataacgtggtggtatttgtccgcgtgctgaatcagcaacgtgtactggtggcaatcaaccgtggcgaggcctgtgaagtggtgctacccgcgtcaccgtttctcaatgccgtgcaatggcaatgcaaagaagggcatgggcaactgactgacgggattctggctttgcctgccatttcggctacggtatggatgaactaacgttttataacgccttgcgtgacgcctgcgccatcatccgcggataaaactgccagaagcgggtttcgagggcgtcataatgagcgtctaaatcgtaccaggagtcacgcagggcatccagacgtgggcggcggcttgccatgccgtttaacacgttctggatgaaatccatatcgcgatagcgcaccagccactgctctgaccacaagtaattgttcagattgataaaacgtggcggtgagtccggcaaaatcgtcatcacttgctcgcgggcataacagacaaattcctgtagcggaaagtccggcgacagctgcgaccagtggcgggaaagaaagtgatcccacatgacatccagcgtaataggcgcaacgcggcgcgtttcactacgaaaccactcccgtgcttcgcggacttccggcagattgtcagtcaatacgtcgatacgtcgatgcatatgaatgccagccacgacgtcgggcggaaaactttcttcaggatttccgcgtacgaaatcagccagtaaattgccggaaagcgagctttccgcgagatgggctaaatgcaggtgagctaaaaaattcatcgattatattctatccaaaagggggtaaaggttgcagggagagcgccccggcactagactacccgcctcttattttagtctgagtcagtgtcatgcgcgttaccgatttctcctttgaattgcccgaatccctgattgcccactatcccatgcctgaacgcagtagctgtcgtttactgtcgctggacgggccgacgggcgcgctgacgcacggtactttcaccgatttacttgataagctcaaccccggcgatcttctggtttttaataatacccgcgtgatcccggcgcgcctgtttgggcgtaaagccagcggcggcaagattgaagtgctggttgaacggatgctcgacgacaaacgcattcttgcgcatattcgcgcctcgaaagcgccaaaacctggcgcagaactgctgctgggcgatgacgaaagtattaacgcaacaatgaccgcgcgccacggcgcactgtttgaagtcgaatttaatgatgaacgctcggtgctggatattctcaacagcatcggccatatgccgctgccgccgtatatcgaccgtccggacgaagacgctgaccgcgaactttatcaaaccgtttatagcgaaaaaccgggcgcggttgcagccccgaccgcaggtctgcattttgacgagcctttgctggaaaaattgcgcgccaaaggcgtggagatggcgtttgtgacgttgcacgttggtgcgggcaccttccagccggtgcgcgtcgacaccattgaagatcacatcatgcactcggaatacgctgaagtaccgcaggatgtggtagacgcggtactggcggcgaaagcgcgcggtaaccgggtgattgcggttggcaccacttcagtacgttcgctggaaagcgcggctcaggcagcgaaaaacgatctcattgaaccgttcttcgacgatacccaaatctttatctatccgggcttccagtacaaagtggtcgatgcgctggtgacgaacttccacttgccagagtcgacgctgattatgctggtttcggcctttgccggttatcaacacaccatgaacgcctataaagcagcggtagaagagaaatatcgcttttttagttacggtgatgcgatgtttatcacgtacaatccgcaggcaattaatgagcgcgtcggggagtaattccgcggcgctggtttaaaacgttggactgtttttctgacgtagtggagaaaaaatgaaatttgaactggacaccaccgacggtcgcgcacgccgtggccgcctggtctttgatcgtggcgtagtggaaacgccttgttttatgcctgttggcacctacggcaccgtaaaagggatgacgccggaagaagttgaagccactggcgcgcaaattatcctcggcaacaccttccacctgtggctgcgcccgggccaggaaatcatgaaactgcacggcgatctgcacgattttatgcagtggaaggggccgatcctcaccgactccggcggcttccaggtcttcagccttggcgatattcgtaaaatcaccgaacagggcgtgcacttccgtaacccgatcaacggcgatccgattttcctcgatcctgaaaaatcaatggagattcagtacgatcttggttcggatatcgtcatgatctttgatgagtgtacgccgtatcctgctgactgggattacgcaaaacgctccatggagatgtctctgcgttgggcgaagcgtagccgtgagcgttttgacagtctcggaaacaaaaatgcgctgtttggtatcatccagggcagcgtttacgaagatttacgtgatatttctgttaaaggtctggtagatatcggttttgatggctacgctgtcggcggtctggctgtgggtgagccgaaagcagatatgcaccgcattctggagcatgtatgcccgcaaattccggcagacaaaccgcgttacctgatgggcgttggtaaaccagaagacctggttgaaggcgtacgtcgtggtatcgatatgtttgactgcgtaatgccaacccgcaacgcccgaaatggtcatttgttcgtgaccgatggcgtggtgaaaatccgcaatgcgaagtataagagcgatactggcccactcgatcctgagtgtgattgctacacctgtcgcaattattcacgcgcttacttgcatcatcttgaccgttgcaacgaaatattaggcgcgcgactcaacaccattcataaccttcgttactaccagcgtttgatggcgggtttacgcaaggctattgaagagggtaaattagagagcttcgtaactgatttttaccagcgtcaggggcgagaagtaccacctttgaacgttgattaatattaataatgagggaaatttaatgagcttttttatttctgatgcggtagcggcaacgggtgcaccggcgcaaggtagcccgatgtctttgattttgatgctggtggtattcggtctgattttctatttcatgatcctgcgtccacagcagaagcgcaccaaagaacacaaaaagctgatggactccattgccaaaggtgatgaagttctgacgaacggtggcctggttggtcgcgtaaccaaagtagcggaaaacggctacattgctatcgcgctgaatgacaccactgaagtagttattaaacgtgacttcgtagctgccgtcctgccgaaaggcaccatgaaggcgctgtaattaaaatttttccctaagggaattgccgtgttaaaccgttatcctttgtggaagtacgtcatgctgatcgtggtgattgtcatcggtctgctgtatgcgcttcccaacctgtttggtgaggatccggctgttcagatcactggtgcgcgcggagtcgccgccagtgagcaaacgctgatccaggtccagaaaacgttacaagaagaaaaaataactgctaagtctgtggcactggaagagggcgctattcttgcgcgcttcgactccactgacacccagttgcgcgctcgtgaagcattaatgggcgttatgggtgacaaatacgtcgtggcgcttaaccttgccccggcaacgccgcgctggctggcagctattcacgctgagccgatgaagctcggccttgacctgcgtggcggcgttcacttcctgatggaagtggatatggacaccgcgcttggcaaactccaggaacaaaatatcgatagcctacgcagtgacctgcgcgaaaagggcatcccgtataccactgttcgtaaagaaaacaactacggcctgagcatcactttccgcgatgctaaagctcgtgatgaagccattgcgtatctgagcaagcgccatccggacctggtgattagcagccagggcagcaaccagctgcgtgcggtaatgagcgatgctcgtctgagtgaagcgcgtgaatatgcggtgcagcagaacattaatatcctgcgtaaccgtgtaaaccaacttggcgtggcggagccggtggttcagcgtcagggtgctgaccgtatcgttgttgaactgccaggtattcaggacactgcgcgtgcgaaagagattctgggtgcgacggcaacgctggaattccgtctggtaaacaccaacgttgaccaggccgctgcggcatccggtcgcgtaccgggcgactctgaagtgaaacagacccgcgaaggtcagccagttgtgctgtacaaacgcgtaattctgaccggtgaccatatcaccgactccacttccagccaggacgaatacaaccaaccgcaggttaacatctcgctcgatagcgctggtggtaacatcatgtctaacttcactaaggacaacatcggcaaaccgatggcaaccctgtttgtggagtacaaagacagcggtaagaaagatgcaaatggtcgtgcggttctggtgaaacaggaagaggtgattaacatcgccaacatccagtctcgtctgggtaacagcttccgtatcaccggcatcaacaacccgaacgaagcccgtcagctgtcactgctgctgcgtgccggtgcgttgatcgcgccgattcagattgttgaagaacgtaccattggcccaaccctgggtatgcagaacattgaacaggggctggaggcttgccttgccggtctgctggtttctattctgttcatgatcatcttctataagaagtttggtctgattgcgaccagtgctctgattgccaacttgatcttaatcgtcggcattatgtcgctgttgccaggcgcaacgctgagtatgccaggtatcgcgggtatcgtcttaacccttgcggtggcggtcgatgcgaacgtactgatcaacgaacgtattaaagaagagttgagcaacggacgtactgttcaacaggcaattgatgaaggttatcgtggcgcattcagttctatcttcgatgcgaacatcaccacgctgattaaagtcatcatcctgtacgcagtgggtaccggggcaattaaagggttcgcgattactaccggtatcggtgtggcgacgtcgatgtttaccgcgattgtcggtacgcgtgccatcgtaaacctgctatatggcggcaagcgcgtcaagaagctgtcaatctgaggagtgcgatgtggcacaggaatatactgttgaacaactaaaccacggccgtaaagtctatgactttatgcgctgggactactgggctttcggcatctctggtctgctgttaatcgctgctatcgttattatgggcgtgcgcggctttaactgggggctggatttcaccggtggtacggttattgaaattacgctcgaaaaaccggctgaaattgacgtaatgcgtgatgcattgcaaaaagccggttttgaagagccgatgctgcaaaactttggtagcagccatgacatcatggtccgtatgccgcctgctgaaggcgaaaccggcggtcaggtgttgggcagccaggttctgaaggtgattaacgaatccaccaatcagaatgcagcagtgaagcgtattgagttcgtcggtccgagcgtgggggcagaccttgcgcaaaccggtgcgatggcgttgatggcagcgctgctgtctatcctcgtgtatgtaggtttccgctttgagtggcgactggcggcaggggtggttattgcgctggcgcacgacgttatcattacgctgggtattttgtcgttattccatatcgagattgacctgaccattgtggcatcgttgatgtcggttatcggttactcgcttaacgacagtatcgtggtatcggaccgtattcgtgaaaacttccgcaagatccgtcgcggtacgccttacgaaatctttaacgtgtccttgacccagacgctgcaccgtaccttgatcacatccggtactaccttgatggttatcctgatgctgtacctcttcggtggtccggtactggaaggcttctcgctgaccatgcttatcggtgtttccatcggtactgcatcttccatctatgtggcatctgcgttggctctgaaactgggtatgaagcgcgaacacatgttgcagcagaaagtggaaaaagaaggggcggatcagccgtcaattctgccgtaatcaagttcccgttgatgttgaaaatcccggtcagaagatcgggatttttttgatgtatggagattgcgaaaatccccgcatcttgggaaactgcgcgtaaccctacatttcatccaggtaacttttcatggctatcatcccaaaaaactatgcgcggttagaaagcggctatcgcgaaaaagcattaaaaatctatccgtgggtctgcggtcgctgttcccgcgagtttgtttattccaacctgcgtgaacttaccgttcaccacattgatcacgaccataccaataacccggaagatggcagtaactgggaattgttgtgtctctattgccacgatcatgagcattcgaaatataccgaagcggatcagtatggtacgaccgttatcgcaggggaagatgcgcagaaagatgtcggtgaagcgaagtacaacccattcgctgacctgaaagcgatgatgaacaagaagaagtgattaaaacgtaaaattgcctgatgcgctacgcttatcaggcctacgttatttcagcaatatattgaatttacgtgcttttgttggccggacaaagcgtttacgccgcatccggcatgaacaaagcacacgttgttaacaatcagaaatgccgggaataaatcccggcattttcataatcagaagttgtaacctactaccaggtaaccaccccagccggtagagcgaacgttgaagttgccgttgccgaagttcagttctgcatcgtcgttccactgaccaccgtcgtgccagtaacgagctacgacagagtagtgccagtgatcgtagttcagagccagaatatggctggaagcgatagagttattagtacgggtcttaataccgttgattgcgttaccgctgtcatcccctaaatcggaaccccagtcgaagttggtgaagccgatgtagctcagctgaccgccccacagatcggtaatcggcacaaagtatttaattttgaaacggtaaccgtcccactcgttttcgttcgctgcgccatagttctgccactggtatttcgcatagacgttcatggacaggctcatcggcaggccagtgtcgatatcggtacccagacccatgtaccaggtgctctggcgaccatctttattacgacccatgtcgtaaatgtagttgttcgcgaagtaccactctttgaacggaccgaagctaaggtcagtattggtcagcttgtcgatggagaaacgtggttcgatttccataaacagcggagaaccgtggttccagatacctttagcatcggagttaccgccgaagaataccggcgcatccgcataaccatagaagtcgaaccagtcttttttagcgaatgcttcgtactcaaggtaggtatcgttgcggatctgcggtccgaaacgggtgtgatagcttccgacaacgttaacgctctggtgccaccagtcggaaagatactgcggtttgtcgttttcagctgcgttgacagtaaaagacgaagagagcgccagtaccgcaccggctgccagtaatgtttttttcatatgtatgccactgtttgaaaatcccttgcgggagtgaaaaaggcgcaaattgcgtttctaaatatttcgtatacagaggagcctattataaaaatcattgctcacaaaaatatgtttcgtttcacagttctatcatttacgtaatcgattgcgttcacgtttacacacattcgggcggggattgtactgactttcgcccttgttgcaaacttttactatcaatccaggtgatgtaagcagagtaacaaaatgacggggaaagatgttgcgggacgcacaaaatcgtcccgaaatacgtttactgcataacaggttgaatgtcgtggatacgtacaaagcctaactgatccacagaaatcccctttaactgtaacggaatatcaacatcgctgggggcgaggacgctggcaggggcattaatcaattgattctgcacattgatttcctgaaagttgtctattgttccctgaatttgcccatattcaacagttccgctgaatgcgggcaagggatcattcgactcaccctgaatacgtagtgtaagggtggtgccatctgcatcaggcgtaatattcaccagcgacatacgtaaagtaccgatctggctttccagtcttgccggtgttttcgctccaggcagaaggtaaaccccactgctggattttgcattcagcctgttttgctgagtgattttgactgtttcttgattgagttgcgtcatctcctggttcagcgtgctgacgctgtgtttcatctgtcgcacttcactttgctgcacacaggcgctaaggctgaacaggcttcccagcaggagcagtcgaaaaacgttagtattcataggtcgtccctttctcgtcgcaattagcctaatggtagagggtaaaagcagcgaaagcatcgatcctttatctcaaaagcgttgcgcctttgttgtatcgtcagttcagggtaaaatagatttccgttaaccacctggtcaggacgccgtatgcattgcccattctgtttcgccgtggacactaaggtaattgactctcgtctcgtgggcgagggttcatccgtacgccgccgtcggcagtgtctggtgtgtaatgaacgtttcaccacctttgaagtggcggagctggttatgccgcgtgttgtaaaaagcaacgacgtgcgtgaaccgtttaatgaagagaaattgcgtagcggaatgctgcgggcgctggaaaaacgtccggtgagttccgatgacgtcgaaatggcaatcaatcatattaaatcgcagctgcgcgccaccggtgagcgcgaagtgccgagcaagatgattggcaatctggtgatggagcaattgaaaaagctcgataaagtcgcctatatccgttttgcctctgtctaccgcagtttcgaagatatcaaagaatttggcgaagagatcgcgcgcctggaggactaagccgtgcaggacgagtattacatggcgcgggcgctaaagctggcgcaacgaggacgttttaccacgcatcccaacccgaatgtcgggtgcgtcattgtcaaagatggcgaaattgtcggtgaaggttaccaccaacgtgcgggtgaaccacatgccgaagtacacgcgttgcgtatggcgggtgaaaaagccaaaggtgcgaccgcctatgtcacactcgaaccctgtagccatcatggtcgtacgccaccgtgctgtgacgcactcatcgccgctggcgtagcgcgcgtggttgcctcgatgcaagatcctaacccgcaggtcgctgggcgtggactttaccgtctgcaacaggctggcattgacgtcagccacggcctgatgatgagtgaagccgagcaattgaataaaggctttctcaagcggatgcgcaccggctttccttatattcagttaaaacttggcgcatcgcttgatggtcgcacggcgatggcgagcggcgaaagccagtggatcacttcgccccaggcgcggcgtgatgtacaactactgcgcgcgcaaagtcatgccattttaaccagcagcgccacggtgctggcggatgatcctgccttaacggtgcgttggtctgaactggatgaacaaactcaggcgctctatccgcaacaaaatctccgtcagccgatacgtattgtgattgatagccaaaatcgcgtgacgccggtacatcgcattgtgcagcagcccggcgaaacctggttcgcgcgtacgcaggaagattctcgtgagtggccggaaacggtgcgtaccttgctgattccagagcataaaggtcatctggatctggttgtactgatgatgcaactgggtaaacagcaaattaacagcatctgggtggaagcggggccaacgctcgctggcgcattgctgcaggcgggtttagtcgatgagctgattgtctatatcgcacctaaactattaggcagcgacgcccgcggattatgcacgctgccagggcttgagaaattagccgacgccccccaatttaaattcaaagagatacgtcatgtaggcccggatgtttgcctgcatttagtgggtgcatgatctcccggctcgaaagggaagcagcgcacgaaatattatgctaaaatccgcccccctgcggggccatactcgaacccgaaggaagaaaatgaacattattgaagctaacgttgctaccccggacgctcgcgtcgccatcaccatcgcgcgtttcaacaactttatcaatgacagcctgctggaaggtgcaattgacgcactgaaacgtatcggtcaggtaaaagatgaaaacattaccgttgtttgggtgcctggtgcctatgagctgccgctggcggcgggtgcactggctaaaaccggtaaatacgacgcggtgattgcgctgggtacggttattcgtggtggcactgcccactttgaatatgtcgctggtggtgcaagcaacggcctggcgcatgttgcccaggacagcgaaattccggttgcttttggggttctgaccactgaaagcattgaacaagcgatcgaacgtgctggcaccaaagctggcaacaaaggtgcagaagctgcactgaccgcgcttgaaatgattaatgtattgaaagccatcaaggcctgaaattagtaaggggaaatccgtgaaacctgctgctcgtcgccgcgctcgtgagtgtgccgtccaggcgctctactcctggcagttgtcccagaacgacatcgctgatgttgaataccagttcctggctgaacaggatgtaaaagacgttgacgtcctgtacttccgtgagctgctggccggggtggcgactaataccgcatacctcgacggactgatgaagccatacctgtcccgcctgctggaagaactgggacaggtagaaaaagcagtactgcgcattgcgctgtacgaactgtctaaacgtagcgatgtgccatacaaagtggccattaacgaagcgatcgaactggcgaaatcgttcggcgcagaagacagccataagttcgtcaacggcgtactcgataaagcagcacctgtgattcgccctaacaaaaagtgatatccaggccggtagattcacggaagaccgttccatgatcgccggccttttcttttttacctgctgaggcataacgtatggcatgtggcgagttctccctgattgcccgttattttgaccgtgtaagaagttctcgtcttgatgtcgaactgggcatcggcgacgattgcgcacttctcaatatccccgagaaacagaccctggcgatcagcactgatacgctggtggcgggtaaccatttcctccctgatatcgatcctgctgatctggcttataaagcactggcggtgaacctaagcgatctggcagcgatgggggccgatccggcctggctgacgctggcattaaccttaccggacgtagacgaagcgtggcttgagtccttcagcgacagtttgtttgatcttctcaattattacgatatgcaactcattggcggcgataccacgcgtgggccattatcaatgacgttgggtatccacggctttgttccgatgggacgagccttaacgcgctctggggcgaaaccgggtgactggatctatgtgaccggtacaccgggcgatagcgccgccgggctggcgattttgcaaaaccgtttgcaggttgccgatgctaaagatgcggactacttgatcaaacgtcatctccgtccatcgccgcgtattttacaggggcaggcactgcgcgatctggcaaattcagccatcgatctctctgacggtttgatttccgatctcgggcatatcgtgaaagccagcgactgcggcgcacgtattgacctggcattgctgccgttttctgatgcgctttctcgccatgttgaaccggaacaggcgctgcgctgggcgctctctggcggtgaagattacgagttgtgtttcactgtgccggaactgaaccgtggcgcgctggatgtggctctcggacacctgggcgtaccgtttacctgtatcgggcaaatgaccgccgatatcgaagggctttgttttattcgtgacggcgaacctgttacattagactggaaaggatatgaccattttgccacgccataaagatgtcgcgaaaagtcgcctgaagatgagtaatccgtggcatctacttgctgtcggattcggaagtggattaagcccgatcgttcctgggacgatgggctcgctggcagcgattccgttctggtatctgatgacctttttgccctggcagctctactcgctggtggtgatgctggggatctgtatcggcgtctatctttgtcatcaaacggcgaaagacatgggtgtgcacgatcatggcagcattgtctgggacgaatttattggtatgtggatcacgctcatggcgctgccgaccaatgactggcagtgggttgccgccgggtttgtgattttccgtattctggatatgtggaagccgtggccgatccgctggtttgatcgcaatgtgcatggcggcatggggatcatgatcgacgatattgtcgccggggtgatttccgcaggcatcctgtattttatcggtcatcactggccgctgggtattctgtcgtagttgtgcaccgatgcctgatgtgacgcttgtcacgtctcatcaggcctggactcttatttaaatcctacgacaggatgcggtttatacggcgtttccagttcggcaatctgttccggcttcaaagtgatatccaccgcgttcaatagctcatcaagctgttcttcgcgcgaagttccgataatcggtgcggcaatgcccggtttactcaacaaccaggccagcgcaacttgtgctcgtgtcgcccccagttcttcactgacgcctgttaaccgctctgcgatctgcgcgtcattttcatcgctttctttatagagatttttccccacctcatcagacaccagtcgtgcggtagtttctccccacggacgcgtcagacggccccttgccagcgggctccatggaattaccgccacgccctcctgataacacagtggtagcatctcgcgctcttcttcacgataaatcagattgtagtgatcctgcatactgacaaactgcgcccagccgtgctgtttttggagttccagtgcctgagcaaactgcgaagcgtgcattgatgacgcgccgatataacgcgctttcccggcttttaccacgtcgttgagggcttccagcgtctcttcgatcggcgtgttgtaatcccagcgatgaatttgcaggatatcgacataatccatgccgagacgtcgcaggctgtcgtcgatagagcgcaaaatttgcgcacgggataatccttccggtaaatcaccaacgcgatggaacactttggtcgcaacgaccacgtcttcacgacgggcgaaatcccgcagtgcgcgaccgacgatctcttcgctgctgccgtcagaataactgttggcggtatcaaagaaatttatgccgccttccagtgcacgtttaattatgggacggctgctttcttccggcagtgtccatgcgtgattaccgcgatctggctcgccaaaggtcatacagccgaggcaaagtcgggaaacgcgaaggtcggtttttcctaaggggttgtattgcatgctgccactcctgctatactcgtcatacttcaagttgcatgtgctgcggctgcattcgttcaccccagtcacttacttatgtaagctcctggggcttcactcgtttgccgccttcctgcaactcgaattatttagagtctatgaataatttcttaagcatagcaggagtggagtagggattatgccagccaggccttgattttggcttccataccagcggcatcgaggccgagttcggcgcgcatttcttcctgagttccttgcggaataaagaagtccggcaggccaatgttcagcacgggtactggtttacgatgggccatcagcacttcgttcacgctgctgcctgcgccgcccataatggcgttttcttctacggtgaccagcgcttcatggctggcggccatttccagaattaacgcttcatcaagcggtttcacaaaacgcatatcgaccagcgtggcgttcagcgattcggcgactttcgccgcttctggcatcagcgtaccaaagttaaggatcgccagtttctcgccacgacgcttcacaatgcctttgccaattggtagtttttccagcggcgtcagttccacgccgaccgcgttgccacgcgggtagcgcaccgctgacgggccatcgttatagtgatagccggtatagagcatctggcgacattcgttttcatcgctcggggtcataatgaccatttccggtatgcagcgcaggtaagagagatcaaaagcaccctgatgggtttgaccgtcagcaccaacaatgcccgcgcggtcgatggcgaacaggaccggaagcttttgaatcgccacgtcatgcagcacctgatcataggcgcgttgcaggaaagtggagtaaatcgcgacaatgggtttgtacccaccaatcgccagacccgcagcaaaggtcaccgcgtgttgctcggcaattgccacgtcgaagtagcgatccgggaatttacgtgaaaactcgaccatgccggaaccttcacgcatcgccggagtaatcgccatcagcttgttgtctttcgctgccgtttcgcacaaccagtcgccaaagatttttgaatagctcggcaaaccgccgctacttttcggcaaacaaccgctggagggatcaaatttaggcacggcgtggaaagtgatcgggtctttttctgccggttcataaccacgaccttttttggtcatgatatgcaggaactgcgggcctttcaggtcgcgcatgttctttagcgtggtgataagccccagcacatcgtgaccgtccaccgggccgatgtagttaaagcccagctcttcaaacaacgtgccaggcactaccatgcctttaatatgttcttcggtgcgtttgagcagctctttaattggcggcacgccagagaaaacttttttcccgccttcgcgcagtgaagagtaaagcttaccggaaagcagctgtgccagatggttgttgagcgcgccgacattttcggaaatcgacatttcattgtcgttgagaatcaccagcatatcaggacggatatcgcccgcgtgattcatcgcttcaaacgccatgcctgcggtaatcgcgccatcgccaatgacacagacggtgcggcgatttttgccttctttttcggcagcaaccgcaataccaattccggcactgatggaggttgatgaatgcccgacgcttaatacgtcatattcgctttcgccgcgccacgggaacgggtgcagaccgcctttctgacggatggtgccgattttgtcgcggcgtccggtcaaaattttatgcggataagcctgatgccccacatcccaaatcaattggtcaaacggggtgttgtagacatagtgcagcgccacggtcagttcgaccgtgcccagcccggaggcgaagtgcccgctggaacggctcacgctgtcgagtaaatagcggcgcagttcgtcgcagagtttcggtaaactctctttcggcaacagtcgtaactcctgggtggagtcgaccagtgccagggtcgggtatttggcaatatcaaaactcatcaggggcctattaatacttattgtttatttattacgctggatgatgtagtccgctagcgcttccagtgccgaggtatcgagtgactgttcagccagttgtttcagcgactgacgggcatcgtcgatcagatcccgggctttcttccgggcttgctcaagacccagaagtgcagggtaggtacttttaccaagttgctggtcggcaccctggcgttttcccaacgttgcagtatctcccaccacatccaggatgtcatcctgaacctggaaggcaaggccgatgctctctgcatacttgtcgagtaccggcagagcacgacgtcctttatctccggcgcttaatgcaccaaggcgaacggcggcgcgaatcaatgcgccggttttatgacgatgaatacgctcaagcgcgtccagaggtacgtgtttgccttccgcgtctaaatctaatgcctgaccaccgcacattccggcaataccactggcgctcgccagttcagaaatcatcgaaattctgtcgcggtccgacacttccggcatatcggcatcgcttaaaatcgagaacgccagcgtttgtaaagcgtcgccagcgagaatcgcgtttgcttcgccaaacttcacatggcaggttggcaaaccgcgacgcagatcgtcatcatccattgccggtaaatcatcatgaattaatgagtaagcgtggatacactcaacggcggcagcgggtgcgtccagcgtgtttgtgctaacgccgaacatatgaccggtggcataaaccaggaaaggtcgcaggcgcttaccacctaataatgcgccatactgcatggtttcgaccacgggagtgttctgaaagggcagtggggcgataaaacggctcagcgcctggttggcctgcttaacgcaggcttcgagttgctgcggaaagtccattactcattgtccggtgtaaaaggggttagagaggcgtcttcattgtcagacagcagaatttgtacgcgctgttcggcttgttgtaatttggcctgcccctgacgtgccagctgcacgccgcgttcgaactcgttcagcgcctcttccagcggcaggtcgccactttccagacgggttacaatctgttccagctcgctcagcgccttttcaaagctggcgggcgcctcatttttcttcggcataatgaatgtctgactctcaatatttttcgccccgtcatggtaacggactcagggcaaatagcaaataacgcgcaatggtaaggtgatgtgcacagcaaagcgatgttagtggtatacttccgcgcctggatgcagccgcaggtgtgggctgctgtatttttccctatacaagtcgcttaaggcttgccaacgaaccattgccgccatgaagtttatcattaaattgttcccggaaatcaccatcaaaagccaatctgtgcgcttgcgctttataaaaatccttaccgggaacattcgtaacgttttaaagcactatgatgagacgctcgctgtcgtccgccactgggataacatcgaagttcgcgcaaaagatgaaaaccagcgtctggctattcgcgacgctctgacccgtattccgggtatccaccatattctcgaagtcgaagacgtgccgtttaccgacatgcacgatattttcgagaaagcgttggttcagtatcgcgatcagctggaaggcaaaaccttctgcgtacgcgtgaagcgccgtggcaaacatgattttagctcgattgatgtggaacgttacgtcggcggcggtttaaatcagcatattgaatccgcgcgcgtgaagctgaccaatccggatgtgactgtccatctggaagtggaagacgatcgtctcctgctgattaaaggccgctacgaaggtattggcggtttcccgatcggcacccaggaagatgtgctgtcgctcatttccggtggtttcgactccggtgtttccagttatatgttgatgcgtcgcggctgccgcgtgcattactgcttctttaacctcggcggcgcggcgcatgaaattggcgtgcgtcaggtggcgcattatctgtggaaccgctttggcagctcccaccgcgtgcgttttgtcgctattaatttcgaaccggtcgtcggggaaattctcgagaaaatcgacgacggtcagatgggcgttatcctcaaacgtatgatggtgcgtgccgcatctaaagtggctgaacgttacggcgtacaggcgctggtcaccggcgaagcgctcggccaggtgtccagccagacgctgaccaacctgcgcctgattgataacgtctccgacacgctgatcctgcgtccgctgatctcttacgacaaagagcacatcatcaacctggcccgccagattggcaccgaagactttgctcgcacgatgccggaatattgtggtgtgatctccaaaagcccgacggtgaaagcagttaaatcgaagattgaagcggaagaagagaagttcgacttcagcattctcgataaagtggttgaggaagcgaataacgttgatatccgcgaaatcgcccagcagaccgagcaggaagtggtggaagtggaaaccgtcaatggcttcggcccgaacgacgtgatcctcgatatccgttctatcgatgaacaggaagataagccactgaaagtcgaagggattgatgtggtttctctgccgttctataaactgagcaccaaatttggcgatctcgaccagaacaaaacctggctgctgtggtgtgagcgcggggtgatgagccgtctgcaggcgctctatctgcgcgagcagggctttaacaatgtgaaggtatatcgcccgtaatttgtggtttttacgtcgcatctggtcagatgcgacgtttgccgcatccgacactactcgtaataattataaatccctgccgccatcaccagttgtgatgccacttcatgggctttttcacgcccaaccaacaggtcgataattttcagaccaaagtcgatagctgtacccggcccctggctggtcagcaattttacccgtgcatcccagacgacgcgcttgtccagccattgttcggcgggaattttgtctttcagcgtcgggaagccggtcatattaccaatcgggaagatatcgtgcggcaccagcacggtggctggcgcggcgcaaatagccgcgacgatacgcccggaacggtggaactgtttaacggtttcaaccatcagagtgctatcgcgaaaacactccgcgcctttaatgccaccaggcagcacgatcacgtcatattcgccatcagccacttcgaccagcggcgcatccgccagcagcttcacgccgcgcgagcaggtaatcgccaggttaccatcgctggcgacgctggcagtggtgactttgataccgccgcgaaccagcagatcgatagtggtgacggcttcagtctcttcactaccaggggcgaggcaaaccagtgccgatgcgctcatattcactctcctttctttttaccatttcaaacaggcgggtgttttccggtacggcaatcccatgcgcgcgggcgcggcgtaagagaaaaccattgatatagtcgatttcagtgtggcgcagcgcgcggatatcctgcaacatcgacgagatattttccgctgtggcatcaatcacctgcatcacgtaatcacgcaaatcttctgctgaagtatgatgcccttcgcgttcgatcaccgccgcgacttcttcgcatatctgcataatttcttgcggatgatgacgtaattcaccgttcgggcaattccagatggcagtcagtggattaatcacgcagttgactgccagcttgcgccacagctcggcgcgaatattgttatgccaggcaacgtcaggcaacacggtttgcaaaatatccgccagataactgtaatccccgtcctgttgccgtgccgggccaatatgcgtgataccgtttgccacatgaataatgacattgccgtcgcggcgggctgcatgggtggtggtgcccatcagtaatggctgctgaatgttttgcaactcttcgatggtgcccatgccgttgtgaattaacagtattggcgtagttacaggcagtgtggacgcgaggcttttgacggcatcggaaacctgccatgctttcagcgtcaccaggagcagatcgctggtggcgagaaaatcgggatcgttggcggtcagcgattcgttaaatatcgaaccatctgtctcaaccagattcacgctacaataaggttgcggtacgcgcagccagccctgaacttcatgaccctgtttgcaaagtgctgtaagccataattgccctaaggcaccgcatcccaatacggtaattttcattgttcctcctcacccgcaaccactccgggtgttcaataaggctatcccttaattgtgcatgctgttgcgactatgcacaattaagggatacgtcctggtgcaggactgtcggttatttaactttgcgggtattatgcttcgcatcaaaaatgaagggagaggaaaagatgccatctttcgatattgtctctgaagttgatcttcaggaagcacgtaacgcggtcgataacgcgagccgcgaagtggagtcccgttttgacttccgtaacgttgaagcctcatttgagctgaacgacgccagcaaaaccatcaaagtgttgagcgagtccgatttccaggtcaatcagttgctggatattctgcgtgccaagctgctgaagcgcggcattgaaggcagttcgctggatgtaccggagaatatcgttcatagcggtaaaacctggtttgtggaagcgaaactgaaacagggcattgagagcgcgacccagaagaaaatcgtcaagatgatcaaagacagcaaactgaaagtgcaggcgcaaattcagggcgatgaaatccgcgtaacgggcaaatctcgtgatgatttgcaggctgtcatggcgatggtacgtggtggcgatctcggtcagccgttccagttcaaaaacttccgcgattaatcgcgactatgtgcgttttgttcatgtcagatgcggcatgaacgcctgattcggcctacaaaggtttgtaattcagaaactttgtaggcctgataagcgtagcgcagcaggcaattcgccgcgttttttatgcctgacgaattgcctgttctatctcaaagcgattcgtcactttgctgtcgattttcacataagctgaatgttcttcttctgcaatcaacacttctttgatgccttcagtttctagcaaacgcacttttaacgcctcgtttgcggcaatgttcgccgggatttcaatgcgcaaactgctgacatacggcggttctttcatggtactggcgactgtcagccacactgcggccagcattgcgccagcgagaaataccccctgaccgtcaaacatgccgttaatccagccgcccagcgaaccgccaatcgccacgccaagaaactggctggtggagtaaacacccatcgccgtacctttgtaacctgctggcgactctttactgataagtgagggcaggagggcttccatcaaattaaacgccacaaagaaaagctgcacgccgaccaccagttgccagaactgcgtttgtgcgttccacaacacaatttccgcaaccacgatcaacccgacgcagaagacaaagacttgcttcattttgcgcttaacttcagcgtagataatgaaaggcacgaccgagccaaaggcgattagcattgtcgccagatagaccttccagtgttcagccgccgggaaccctgcatcagccagttgtccgggcagggcaacaaacgtcgacatcagcaaaatatgcagacacataatgccaaagttgagtttcagcagccgcggttccgccagcactttactgaaactgcctttcaccattccggactcacgattaagtacgtgagtgctactgttgggcacaacccaaatggtcaacgcaatgccggtcgttgccagaatagcgatcatccagaacagcgcgtgcagcccaagtttgtgagtgatgatcgggccaagcaccatcgcaatggcaaaggtaatgccaaagctcacgccgataaacgccatcgctttggtgcggttttgttcgcgcgtgagatcggaaagcagcgccataacggcggcggcaattgctccagagccttgtagcgcccggcccagaataattccccagatggagtcggaaagcgcagcgataacgctaccggcggcaaacaccgccagcccaccgacaattaatggtttgcgaccaatgcggtcggaaagcaggccaaacggaatctgaaaaacggcctgagtcagaccataaataccaatggcaataccgattaatgcttcgctggcaccttgcagagccatgccgtacgtggtcagaaccggcagaaccataaacatgcccagcatgcgcaacgagaatacggtccctaaaccccaggtcgcgcgcctctcacctggcgtcattttataatcgttcattaccacctctgttttaaattcgcgactagtgtaaagcggcaaacgaatggggtaaacatgcggattttttagtaaatatttcgagagggatatgtttctaatgctaagaaaaaaggtgccgtagcacctttttaatagagaggttttgttaccacacagcagccagcagcgtatgcgagtccggtaccataaaatcaacggacatcatcaccgagagggcagtgatggcgatgatagagaagccgaacagcttgcgcgcccagattctgtcatcagcaactttataaccgcgcagagccatacctaaccaccagacgctaaccgccgcggcgaccaccagatatttatacccagcgtaaccgccaagagagagcatcagcgtggcaacggcaaaggcgatgatatacagcgtgatgtgattcttcgccaccgaaatgccttttaccactggcaataccggaatgtttgccgcctggtaatccttaaagcggaaaatggcgatggcataggagtgaggcatctgccacaggctgaagatagccagcaggatcgctgcgccgctatcgaactcgccggttaccgcacagtagccgatcaccggcggcgcagcgccggagagcgaaccaatcaacgtgccgtagacagagtggcgtttcatgtacaggctataaacgccgacataaaccacaaagcccatcacccccagccagcaggccagcggattcgcgccaaaccacagcagcataaagccagcaatacccagcaacgtggcgtacaccagcgagacagcaggagagatcaggcctttcaccagcacccgattcttcgtcctttccatctttctgtcgatatccctgtcgatgtagttgttaaacacacaacccgacgccacaaccagtgacaccccaaccagcgtgtagataaacaggggataatcaatgctgccctttgaggccagcaggaatcccccaatcaccgagatcaggttgccaaagatgatgcctggtttcgttacttgcaggtattgcttaaacatcataaccgccgctcttagtgcatcatcatgttgtagttgaggttccacataatccagatggagcctacaaccaggatagcgatgattagcacggtgaagacaaacgccgtcatgttccagccttcatctgatttggtattcatgtgcaggaagcacaccagatgcaccagaacctgtaccactgccattgccaggattgttcccagaattacggccggagaggcagctcctgtcatcaccatccagaacggaatcaccgtcagaatgatcgacaggataaagcctgtcatgtaggtttttacgctgccatgggacgcgccgctgtgatcggtagaatgactcattacatcgcccccatcagataaacaacagtgaacacacagatccaaaccacatccaggaagtgccagaacaggctcaggcacatgatgcgggtacggttagtgctggtcaggccgcgacgggcgatttgcaccatcagcaccgccatccagataagaccagaagtgacgtgcagaccgtgcgtgccgaccagcgcaaagaacgctgacaggaagccgctgcgatccggacccatgccgttaacaatcaggtgatggaattcatagatttccatcccgataaatccggcaccaaacaaccaggtcaacgccagccaggagataacctggcttttgttgtttttgtacatggcgatagccgccatgccgtaggtgatggagctgaacaacagcaagaaagtttcaaccagaacgaacggcagttcgaaaatgtccttacctgtcgggccgcctgcggtgccgttcaccagaacggcataggtagcaaacaagatagagaacagaatgcagtcgctcatcaggtagatccaaaatccgaagattttggttccgcctgcatcgtggtgcccgtgttcgtgcgcgtgggcagtcgcgtgcgtcaaagtatcagttgccatttttcagccctgccttagtaatctcatcgaaatgctggttttccagtttttcgatttctgccaccggcacgtagtaatccacgtcctcgtcgaagcttttcacgatccaggtgatgatcatgcctgcgaagccaacaatcgccagccaccagatatgccagatcatggcgaaaccgaagatggtggagaaagctgcaatgacgatacctgcaccgctgtttttcggcatatgaatttcttcatagtggtcaggctttttatacgcttcgcctttctctttcatttcccagaatgcatcacgttcgtgaacgtgcggcactacggcaaagttatagaacggaggcggggaagaggttgcccactccagcgtacggccaccccacgggtcgccagtcaggtcacggttctggtcgcggtcgcgaatagaaacgtacatctgaataacgaggcagagaatacccagcgcaatcagtactgcaccgctggctgcaatcatcagcatggtgtggaactgcgggtcaatctgctggctcaaacgacgggtcatgcccatgaagcccagcgcatacagtggcataaaggcaacgaagaagccgatgatccagaaccagaacgcgcgtttaccccaggtttcgttcagtttgaaaccgaacgctttaggccaccagtaggtcatccctgcgaagcagccgaagaccacgccgccgatgatcacgttatggaagtgcgcaatcaggaacaggctgttatgcagaacgaagtccgcgcccggtacggccagcagcacgccagtcatcccgcccaccgagaaggtgacgataaaaccgatggtccacagcatcgcagaatggaacacgatgcggccctgatacatggtgaacagccagttgaagatcttcaccccggtcgggatggcgataatcattgtggtgataccaaagaaggcgtttacgttcgcgcccgcacccatcgtaaagaagtggtgcagccaaacgatgaacgacagcacggtgatacagacggttgcccataccagcgaggtataaccaaacagacgtttacgcgagaaggttgccgcaatttcggagaacacaccgaaaacaggcaggatcaggatgtaaacttccgggtggccccaggcccaaatcaggttgatgtacatcatcatgttgccacccatatcgttggtaaagaaatgggtgcccagatagcgatccagggtcaacaacgcgacggtaaccgtcagaattgggaaggaagcaataatcagtacgttcgcgcacagtgatgcccaggtaaatactggcatcttgaacatggtcatgcccggtgcgcgcatcttcagaatggtaacgaagaagttgataccggtaagcgtcgtacctataccggatagctggagactccatatccagtaatcgacaccgactcccggactgtactctattcccgatagcggtggataggccagccagccggtctgcgcaaattcgcccacgccgagagaaacgttaaccagaatcacaccaacaacggtaaaccagaagcttaagttgttgaggaacgggaacgcaacgtcacgcgcgccgatctgcagcggaaccaccaggttcatcagaccgataacgaaaggcatcgccacgaagaagatcataatcacgccgtgcgcggtaaagatctgatcgtagtggtgaggtggcaggaagcccgcttcgcccgccgaggcaagagcctgctggctacgcatcataatggcgtcagcaaaaccacgcagcaacatcacaatcgccacgatgatatacatgataccgaggcgtttatggtcgacggaggtcagccactctttccacaggtaggtccacttaccgaagtaagtgatcaggccaacgagcgccagacctcccaaaataatgccagcgatcgtaaccatgacgataggttcatggaacgggactgcatcaagtgataattttccgaacatctttattcttcctcaacccctttaatgggcggattccgcgtggctcatgtccatgccttccataccttcgtgtgcgctgtgctcaccttctggctgggtcatgtccatgctcttaccgtgagccataaacttgttaattacatcggcaaacaagtctggtttcacgttggagaaatattccacctggttgtattcgctaggcgcggccagtttttcgaacgcagccatgtcagacatggtgttcggcgactgcttcgcttttgcgacccactggtcgaatgcggcgcgatccggtgttgcaatagctttgaacttcatgcctgagaagcccgggccgctgtagctggcggagataccgtcataagtgccgggttcgttggcgatcagatgcaggcgagtctgcataccggccatggcataaatctggctacccagacgcggaatgaagaaggagttcatcacggagttggaggtcactttgaagtacaccggagtgttcgccgggaaagcgatttcattcacggtagcaatgccctgttccgggtagatgaagaaccatttccagtccatggaaaccacttcgatggtaatgggcttctcgtcgtgtgccagcggcttgctaggctcaagagcgtgagtggttttccaggtcagtactgcaaggaagatgatgattaagataggtaccgtccagaccacagcttccactttattggagtgtgaccagttcgggctgtacttagcatctttattgctcgcacggtacttccaggcgaaaccaacagccatcaagattgcgggaataacgacaatcaacatcaggccaaatgccgtcagtatcagtgaacgttgctccagaccaatctgtcctttgggatctaacagcgcagaattacagccactgagcaatacagtgcctgcaaataatgacaaccatcccaaacttttattgtatttcctgagtctcatttaacgacctcaattccacgggatctggtggcgtttaaagtgtgtgggcattttacgggaaggttacattactgtaaacatgattaaattcctgttacttggatttggctgccaggtcacatatgttgcaaaacatatcaggttgattttaagaagctgttgcaaaagggcgttataacaaaaggggagtgctgaaggagtctgggcgggcaattggtataaccaatgtgaaataaaacaattatttaacaaataattatcattagagtgacaactgggtgatgagaaaataaagactcattagctgaatcgtgtaagaaaaatagaatttataaatggcgccaataatttccaaacgctaagccgcacaaaagaacaaatattaataagcgatactgatgtttatttagccgtaataattacggcgagtgattactacagctaaataatatttacagattacgtcagatgcgtttttcgtagcgccagataatccagcaaaccaccaagcacgacgccagaaagggcgactaaaaccccgacttccagcagagcaggcaggaaagagaagtgcgtcaaatccagcgcgtccatcgtcaatagcagtaaccacacggccaacaggctgacgcccgccgccagtgtccacatggcaaaggcataacctgccggatatgcggtacgggagataaagttgtcatttactcgtgtatattcaagcgtctggcggcaaaccagcagcaaaataagccctggtacggcagcggcgacggagaatagatagaatgtcgaccagccgtgtgcttcaacaaaccaacccgccacggggccgacataaactcgccctacagcagaaagcgctgagagcagggcaaattgagtagcggaaaatgacttattacatagcgtcattaacagcgcgacaaaggctgatgtgcccatcccgccacagaggttttcgaaaaagacggctgcgcccatgctgtagagatgcttatcagtaatcgacagcagccagtaaccggcgttagacgcaccttgtaaaatgccgaaaatcagcagtgcccggaacagtgacaggcgctgcatcaaaatcccaccgtacaatgcgccaacaatggtcgctagtaagccaagcgttttgttaaccacgcctacttcacccgcatcaaacccgacgccgcgaatcaaaaacgtggttgtcaggctcatggcgaatgcgtcgcccagcttatacagcacgataagaagcaaaataagccaggcattattgcgaccaaagaaatctcgcagaggtgcaacaaccgcttgttccagcgtttttggcacaggaatggtgtcggtcggttctggtgcaagcaacgtcgcgataatacaggggatcaacagcgccgccatcaaccagtacatgccctgccagcccagccatttatctgccagccacagggctaggccgccggaaaccagcatccctaaacggtaacccagaacgctgattgccgcgcccgcaccacgttcttctgccgggagcacatcggttttccacgcatcgaagacaatatcctgggaggcagagcaaaaagcgatcaccaccgccagcgccgccatccagcggagttgggtgcctggttcgagaaaacccatcgccgcaatggcgactaataacaggatttgcgtggcgagcagccaaccgcgtcgccgcccaaaaaatggaggcgtgtagcggtccatcagcggtgaccagaggaatttaaaaacgtaagcctggcctaccagagagaagaaaccaatggttttgagatcaatattctcgaccgtcatccaggcctgtaaggtaccggatgtcagggcgagcggtagcccggaagcaaaacccaggatcagcaatatggctgaacgcggctgttgaaaaatacgtaaatattgactggacatgggcgtctacaggcccggcttgcaccgggccagagggcagaaattaacgcgcgttctgcttgatgaattcgtggatgctggtgtcctgagacatatcagcgatggtatcggtcagcacactgttaaccgcatcggcgatatttttgttggaggcctggaacgcaccttcaacgttgtagctggcacgatagtttttggtcattttgttgccattctgcgcggtagcgatgatggcgatatccgctttggtcgcgatgttgtagcgcacgttgccctgggacacgtcagcatacagttggctaacgatgatttgcagattaaccgggccattcggaccaaccatgtaaccacgcgcggtcatctgtttttccagcacttcttgcagcaggaaacgcagatcgcgggaggcggtcagggtaacgatttgattatcgcgggtgacttttgccagcgcctgatcggtacgctgatcggcaccattaatgcttacggtgacgcccatcaggcttggatcctgctgtggcagtgtaatcgtcggggaaacttcaatagttgttggcggttttgcgcatcctgcaagcataaacagagcaactaacgggaagaggatttttttgaacatgttcgggctctcagagactcttaagcgtgtttggtaaaaattcccgccatcataacattgccaacggcgaggggaagtgggtaaggcatgtaaattcatcatgttgacgaaataatcgcccctggtaaaagaaacactgatgcgaggcctgtgtttcaatctttaaatcagtaaacttcatacgcttgacggaaaaaccaggacgaaacctaaatatttgttgttaagctgcaatggaaacggtaaaagcggctagtatttaaagggatggatgacatctcagcgttgtcggaggagatatttcatgatgatacgtgagcggatagaagaaaaattaagggcggcgttccaacccgtattcctcgaagtagtggatgaaagctatcgtcacaatgtcccagccggctctgaaagccattttaaagttgtgctggtcagcgatcgttttacgggtgaacgttttctgaatcgtcatcgaatgatttacagtactttagcggaggaactctctactaccgttcatgcgctggctctgcatacttacactattaaggagtgggaagggttgcaggacaccgtctttgcctctcctccctgtcgtggagcaggaagcatcgcgtaaaaacgcatttgcaactgtcggcgcttttccagtatgttgctaaagattttatgaaaaacggcctgcgggccgttttgttttgtctggattttgcgctttttgcccagcattcagacgaaaattgcccgggaattgtgaaaaaatacgcgacagcgcgcaataaccgttctcgactcataaaagtgatgccgctataatgccgcgtcctatttgaatgctttcgggatgattctggtaacagggaatgtgattgattataagaacatcccggttccgcgaagccaacaacctgtgcttgcggggtaagagttgaccgagcactgtgattttttgaggtaacaagatgcaagtttcagttgaaaccactcaaggccttggccgccgtgtaacgattactatcgctgctgacagcatcgagaccgctgttaaaagcgagctggtcaacgttgcgaaaaaagtacgtattgacggcttccgcaaaggcaaagtgccaatgaatatcgttgctcagcgttatggcgcgtctgtacgccaggacgttctgggtgacctgatgagccgtaacttcattgacgccatcattaaagaaaaaatcaatccggctggcgcaccgacttatgttccgggcgaatacaagctgggtgaagacttcacttactctgtagagtttgaagtttatccggaagttgaactgcagggtctggaagcgatcgaagttgaaaaaccgatcgttgaagtgaccgacgctgacgttgacggcatgctggatactctgcgtaaacagcaggcgacctggaaagaaaaagacggcgctgttgaagcagaagaccgcgtaaccatcgacttcaccggttctgtagacggcgaagagttcgaaggcggtaaagcgtctgatttcgtactggcgatgggccagggtcgtatgatcccgggctttgaagacggtatcaaaggccacaaagctggcgaagagttcaccatcgacgtgaccttcccggaagaataccacgcagaaaacctgaaaggtaaagcagcgaaattcgctatcaacctgaagaaagttgaagagcgtgaactgccggaactgactgcagaattcatcaaacgtttcggcgttgaagatggttccgtagaaggtctgcgcgctgaagtgcgtaaaaacatggagcgcgagctgaagagcgccatccgtaaccgcgttaagtctcaggcgatcgaaggtctggtaaaagctaacgacatcgacgtaccggctgcgctgatcgacagcgaaatcgacgttctgcgtcgccaggctgcacagcgtttcggtggcaacgaaaaacaagctctggaactgccgcgcgaactgttcgaagaacaggctaaacgccgcgtagttgttggcctgctgctgggcgaagttatccgcaccaacgagctgaaagctgacgaagagcgcgtgaaaggcctgatcgaagagatggcttctgcgtacgaagatccgaaagaagttatcgagttctacagcaaaaacaaagaactgatggacaacatgcgcaatgttgctctggaagaacaggctgttgaagctgtactggcgaaagcgaaagtgactgaaaaagaaaccactttcaacgagctgatgaaccagcaggcgtaatttacgcagcataacgcgctaaattcgcacaaaggcccgtcaccgccaggtggtgggcttttttttgtcatgaattttgcatggaaccgtgcgaaaagcctctttcggtgttagcgtaacaacaaaagattgttatgcttgaaatatggtgatgccgtacccataacacagggactagctgataatccgtccataaggttacaatcggtacagcaggttttttcaattttatccaggagacggaaatgtcatacagcggcgaacgagataactttgcaccccatatggcgctggtgccgatggtcattgaacagacctcacgcggtgagcgctcttttgatatctattctcgtctacttaaggaacgcgtcatttttctgactggccaggttgaagaccacatggctaacctgattgtggcgcagatgctgttcctggaagcggaaaacccagaaaaagatatctatctgtacattaactccccaggcggggtgatcactgccgggatgtctatctatgacaccatgcagtttatcaagcctgatgtcagcaccatctgtatgggccaggcggcctcgatgggcgctttcttgctgaccgcaggggcaaaaggtaaacgtttttgcctgccgaattcgcgcgtgatgattcaccaaccgttgggcggctaccagggccaggcgaccgatatcgaaattcatgcccgtgaaattctgaaagttaaagggcgcatgaatgaacttatggcgcttcatacgggtcaatcattagaacagattgaacgtgataccgagcgcgatcgcttcctttccgcccctgaagcggtggaatacggtctggtcgattcgattctgacccatcgtaattgatgccagaggcgcaactgtgccgctatacttatccagggcggcacaacgctgtaagcggcttgcgcctgagaatggcatttgcgtcgtcgtgtgcggcacaaagaacaaagaagaggttttgacccatgacagataaacgcaaagatggctcaggcaaattgctgtattgctctttttgcggcaaaagccagcatgaagtgcgcaagctgattgccggtccatccgtgtatatctgcgacgaatgtgttgatttatgtaacgacatcattcgcgaagagattaaagaagttgcaccgcatcgtgaacgcagtgcgctaccgacgccgcatgaaattcgcaaccacctggacgattacgttatcggccaggaacaggcgaaaaaagtgctggcggtcgcggtatacaaccattacaaacgtctgcgcaacggcgataccagcaatggcgtcgagttgggcaaaagtaacattctgctgatcggtccgaccggttccggtaaaacgctgctggctgaaacgctggcgcgcctgctggatgttccgttcaccatggccgacgcgactacactgaccgaagccggttatgtgggtgaagacgttgaaaacatcattcagaagctgttgcagaaatgcgactacgatgtccagaaagcacagcgtggtattgtctacatcgatgaaatcgacaagatttctcgtaagtcagacaacccgtccattacccgagacgtttccggtgaaggcgtacagcaggcactgttgaaactgatcgaaggtacggtagctgctgttccaccgcaaggtgggcgtaaacatccgcagcaggaattcttgcaggttgatacctctaagatcctgtttatttgtggcggtgcgtttgccggtctggataaagtgatttcccaccgtgtagaaaccggctccggcattggttttggcgcgacggtaaaagcgaagtccgacaaagcaagcgaaggcgagctgctggcgcaggttgaaccggaagatctgatcaagtttggtcttatccctgagtttattggtcgtctgccggttgtcgcaacgttgaatgaactgagcgaagaagctctgattcagatcctcaaagagccgaaaaacgccctgaccaagcagtatcaggcgctgtttaatctggaaggcgtggatctggaattccgtgacgaggcgctggatgctatcgctaagaaagcgatggcgcgtaaaaccggtgcccgtggcctgcgttccatcgtagaagccgcactgctcgataccatgtacgatctgccgtccatggaagacgtcgaaaaagtggttatcgacgagtcggtaattgatggtcaaagcaaaccgttgctgatttatggcaagccggaagcgcaacaggcatctggtgaataattaaccattcccatacaattagttaaccaaaaaggggggattttatctcccctttaatttttcctctattctcggcgttgaatgtgggggaaacatccccatatactgacgtacatgttaatagatggcgtgaagcacagtcgtgtcatctgattacctggcggaaattaaactaagagagagctctatgaatcctgagcgttctgaacgcattgaaatccccgtattgccgctgcgcgatgtggtggtttatccgcacatggtcatccccttatttgtcgggcgggaaaaatctatccgttgtctggaagcggcgatggaccatgataaaaaaattatgctggtcgcgcagaaagaagcttcaacggatgagccgggtgtaaacgatcttttcaccgtcgggaccgtggcctctatattgcagatgctgaaactgcctgacggcaccgtcaaagtgctggtcgaggggttacagcgcgcgcgtatttctgcgctctctgacaatggcgaacacttttctgcgaaggcggagtatctggagtcgccgaccattgatgagcgggaacaggaagtgctggtgcgtactgcaatcagccagttcgaaggctacatcaagctgaacaaaaaaatcccaccagaagtgctgacgtcgctgaatagcatcgacgatccggcgcgtctggcggataccattgctgcacatatgccgctgaaactggctgacaaacagtctgttctggagatgtccgacgttaacgaacgtctggaatatctgatggcaatgatggaatcggaaatcgatctgctgcaggttgagaaacgcattcgcaaccgcgttaaaaagcagatggagaaatcccagcgtgagtactatctgaacgagcaaatgaaagctattcagaaagaactcggtgaaatggacgacgcgccggacgaaaacgaagccctgaagcgcaaaatcgacgcggcgaagatgccgaaagaggcaaaagagaaagcggaagcagagttgcagaagctgaaaatgatgtctccgatgtcggcagaagcgaccgtagtgcgtggttatatcgactggatggtacaggtgccgtggaatgcgcgtagcaaggtcaaaaaagacctgcgtcaggcgcaggaaatccttgataccgaccattatggtctggagcgcgtgaaagatcgaatccttgagtatcttgcggttcaaagccgtgtcaacaaaatcaagggaccgatcctctgcctggtagggccgccgggggtaggtaaaacctctcttggtcagtccattgccaaagccaccgggcgtaaatatgtccgtatggcgctgggcggcgtgcgtgatgaagcggaaatccgtggtcaccgccgtacttacatcggttctatgccgggtaaactgatccagaaaatggcgaaagtgggcgtgaaaaacccgctgttcctgctcgatgagatcgacaaaatgtcttctgacatgcgtggcgatccggcctctgcactgcttgaagtgctggatccagagcagaacgtagcgttcagcgaccactacctggaagtggattacgatctcagcgacgtgatgtttgtcgcgacgtcgaactccatgaacattccggcaccgctgctggatcgtatggaagtgattcgcctctccggttataccgaagatgaaaaactgaacatcgccaaacgtcacctgctgccgaagcagattgaacgtaatgcactgaaaaaaggtgagctgaccgtcgacgatagcgccattatcggcattattcgttactacacccgtgaggcgggcgtgcgtggtctggagcgtgaaatctccaaactgtgtcgcaaagcggttaagcagttactgctcgataagtcattaaaacatatcgaaattaacggcgataacctgcatgactatctcggtgttcagcgtttcgactatggtcgcgcggataacgaaaaccgtgtcggtcaggtaaccggtctggcgtggacggaagtgggcggtgacttgctgaccattgaaaccgcatgtgttccgggtaaaggcaaactgacctataccggttcgctcggcgaagtgatgcaggagtccattcaggcggcgttaacggtggttcgtgcgcgtgcggaaaaactggggatcaaccctgatttttacgaaaaacgtgacatccacgtccacgtaccggaaggtgcgacgccgaaagatggtccgagtgccggtattgctatgtgcaccgcgctggtttcttgcctgaccggtaacccggttcgtgccgatgtggcaatgaccggtgagatcactctgcgtggtcaggtactgccgatcggtggtttgaaagaaaaactcctggcagcgcatcgcggcgggattaaaacagtgctaattccgttcgaaaataaacgcgatctggaagagattcctgacaacgtaattgccgatctggacattcatcctgtgaagcgcattgaggaagttctgactctggcgctgcaaaatgaaccgtctggtatgcaggttgtgactgcaaaatagtgacctcgcgcaaaatgcactaataaaaacagggctggcaggctaattcgggcttgccagcctttttttgtctcgctaagttagatggcggatcgggcttgcccttattaaggggtgttgtaaggggatggctggcctgatataactgctgcgcgttcgtaccttgaaggattcaagtgcgatataaattataaagaggaagagaagagtgaataaatctcaattgatcgacaagattgctgcaggggctgatatctctaaagctgcggctggccgtgcgttagatgctattattgcttccgtaactgaatctctgaaagaaggggatgatgtagcactggtaggttttggtacttttgccgttaaagagcgtgctgcccgtactggccgcaacccgcagaccggtaaagagatcaccatcgctgctgctaaagtaccgagcttccgtgcaggtaaagcactgaaagacgcggtaaactaagcgttgtccccagtggggatgtgacgaagttcaagggcgcatctactgatgtgccttttttatttgtattcggtgactttctgcgtcttgtgggctgacaattgcccccgtttcttgtcacaataggcctttgcgcgcatcgatacgttgcgtgaggtacacagtcatctacagcggagtgttgttacaccatgatggacagcttacgcacggctgcaaacagtctcgtgctcaagattattttcggtatcattatcgtgtcgttcatattgaccggcgtgagtggttacctgattggcggaggcaataactacgccgcaaaagtgaatgaccaggaaatcagccgtgggcaattcgagaacgccttcaacagcgagcgtaatcgcatgcagcaacagctgggcgatcaatactccgagctggcagcgaacgaaggctatatgaaaaccctgcgtcaacaggtgctgaatcgtctgatcgacgaggcgctgctggatcagtacgcacgtgagctgaaactgggtatcagcgatgagcaggttaaacaggcgattttcgcgaccccagccttccaggttgacggcaaatttgataacagccgctataacggtatcctcaaccagatggggatgaccgccgatcagtacgcccaggcgctgcgtaaccagctcactacccaacagctgattaacggcgttgccggtaccgattttatgctgaaaggtgaaaccgacgagctggcggcactggtcgcgcaacaacgcgtggtgcgtgaggcgactatcgatgttaacgcgctggcggcgaagcagcctgtgaccgaacaggagattgccagctactacgaacaaaacaaaaacaatttcatgacgccggaacaattccgcgtgagttacatcaagctggatgccgcaacgatgcagcaaccggttagcgatgcggatatccagagctactacgaccagcatcaggatcaattcacccagccgcagcgtacccgctacagcatcatccagaccaaaactgaagatgaagcgaaagcggtacttgatgagctgaataaaggcggtgattttgctgcattagccaaagaaaaatctgccgatattatctctgctcgtaacggcggcgatatgggttggttagaagatgccactatcccggacgaactgaaaaatgctggtctgaaagaaaaaggccaactgtctggtgtcatcaaatcttcggtcggtttcctgattgtacgtctggacgacattcagccagcgaaagtgaaatcgttagacgaagtacgtgacgacattgcggcgaaagtgaaacacgaaaaagccctcgatgcgtactacgcgctgcagcagaaagtgagcgatgcggcaagcaacgacaccgagtctctggccggtgcagagcaagctgccggcgttaaagccactcagacgggttggttcagcaaagataacctgccggaagagttgaacttcaagccggttgccgacgctatctttaacggcggtctggtaggtgaaaacggcgcgccgggcatcaactctgacatcatcaccgtagacggcgaccgcgcattcgtgctgcgcatcagcgagcacaaaccggaagcggtgaaaccgttggcagatgttcaggaacaagttaaggcattggttcagcacaacaaagctgaacaacaggcgaaagtggatgctgagaaactgctggttgatttgaaagccggcaaaggtgcggaagctatgcaggctgccggtctgaaatttggcgagccgaaaaccttaagccgttccggtcgtgacccgattagccaggcggcgtttgcactgccactgccagcgaaagacaaaccgagctacggtatggcgaccgatatgcaaggtaatgtggttctgctggcgctggatgaagtgaaacaaggttcaatgccggaagatcagaaaaaagcgatggtgcagggtatcacccagaacaacgcacaaatcgtctttgaagctctgatgagtaacctgcgtaaagaggcgaaaatcaaaattggcgatgcgctggaacagcaataatcctgaagccgcctcgcaaaaaaatgcgttgcagctgtaacaagaaaaggtcgctttcgcggccttttccatttctgaacattgccatttgtttactgttttcactgccgttaaggtgattccactgttaacaaacaaggagaaaacagtatgaaacacggaattaaagcactgctcattaccctgtccctggcctgtgccggaatgtctcatagcgcgctggcggcagcttctgtggcgaaaccgacggcggtagaaaccaaagcggaagctcctgcagcacaaagtaaagcagcagtaccggcgaaagccagtgacgaagaaggcacccgggtcagcattaataatgccagcgcggaagagctagcccgcgcgatgaatggcgttggcctgaagaaagcgcaggcgattgtcagttatcgcgaagagtacggtccgtttaaaactgtggaggatctaaagcaggtgccggggatgggcaattcgctggtggaacgtaatctggcggtattaaccctgtaattaatttgcatagtggcaattttttgccagactgaagaggtcataccagttatgacctctgtacttataacaacaacgtaaggttattgcgctatgcaaacacaaatcaaagttcgtggatatcatctcgacgtttaccagcacgtcaacaacgcccgctaccttgaatttctcgaagaagcccgctgggatgggttggaaaatagcgacagttttcagtggatgacggcccataacatcgccttcgtcgtggtcaatatcaatattaactatcgtcgcccagcggtattaagtgacctgttaactattaccagtcagttgcagcaattaaacggtaaaagcggcatcttaagccaggtcattacactggagccggaagggcaggtggtagcggatgcgcttattacgtttgtttgtattgatcttaaaacgcagaaagcattagctctggaaggggaattgcgcgaaaagctggagcagatggttaagtaaacgttttgtggtgccggatgctcaagccgcatccggcgacacccggaataattacctcaacccggttttctgcttcatcgctgccatcaccgtcggtttatcggccagataatgattcaaaccgttggcgcgtaaattacatgccgcacaatgaccgcaaccgtcgcctttaaagccgttatagcaggtcaacgtttcgttacggactaaatccagtttgccgtaataatctgccagcgcccaggtttccgctttatcaatccacatcagcggcgtttcaaaacgaatatctttcgccatgcccaaactgacggcatggtttagtgctttcacaaactcatcgcggcaatccgggtagccggagaaatccgtttcgcagacgccagtaattacggcttctgcttttacctgatacgcatatattgccgccagcgtcaggaacaaaatattacgccctgggacaaacgtattcgggataccatcggcttcaggttcataatcaggcaccggaatgctgtcacgcgtcaggctactgaccgccagctcgttgagcagggtgacatccagcaccttatgcgcgcgtgcccccagtttcagcgccagttcgcgtgccacgtcgatttctgcgcgatgccgctgaccgtaatcgaacgtcacgcaatggacttcatcatattgttgtaatgcctgcaccagacaggtggtggaatcctgacctccactgaacacaacgacagcacgtttcatagataatcctgcttgaacaataaaagcgttatggtaacgcctgcgattaacccggaccagctattcattgcgatggcgcgggaagccaggcttcggtaaattcaaaccagccgcgcggtgtcagtcgcacaccgttcacgccgggaggggcactaatgcgatagtgatagttgaacagcggcgtcagcgtcgcatctgtcattaactggctaaaaaccgctttcagggcattaaatcggttttcttcatcaggcattatttgcacggcatccagtgtcgattgtagatgtgcgtatgctggagcgtcgaaaacatgtggccacagcggatcgcagcgcagccattgctccagagtatattccggtgcttcgccaattaatctgtcgcccatcatgaggtctgcgtgtgcctgtagggtcgtgtcgtcccagttttttgcgttatgaaaaataattgtgagttcacagccttccgctgccagtgtcgcctgtaggcgttctgccatggtatgaagttctatcggtaggtgataaaccagcgtcaaggttttcggtagtttgacttcatccggtacctgccaatgcggaatagtccagcctggcagtaatgcatgactggcggtgatcaggttttctccgacttctaacgtttgtaataaaccggattgatgaataatggagatcacttttcgcgcctgccagagggagagtcggggacttttgcgcaacgtcaaatagcaaaaacctaaactgatgccgctactgacctggctgacccgttgcagctcctccggtttgccgatggtgatttgcacgggatgccgacaactggttcccaaatctttttcgaaaagcggcggagttatccagtactcaaccgctttaagcagcggatgacgtaaatggtaataatcatggctttccaggcgcaccagctctgctgtgaattgtgttaagcgaaaaggacccgtgccgatcagtgggaattgcggatgcgccagatggctgcaatagctcgccagccggtgcgcaagccagtaatcagggcgatgtaaaaagaaggtcagacactgcggatgggtgacttcaatacgcttcacgctaataaataattgatccagtgctggcagttgtaacagcatcaataatcgctggtgtaagtgtgaggcttttactgcatcgccgttatgccagtgtagggttgaacgaagataaaagtcccagcgtaacccgtcagtagaggtttcccagtgatgcgctaaatcgccaatcgggcgctgagtattattatcgaagcgggtcaggccggaaaatatctgcccggcgagatgctgctcggcacggccgggcaaaaagcctggttgtagcggttcgagcgggcgatagtagggaatacgcaacgtgggtgtatcgttttgccattgtccgcccataaacggctgtaacagagtgcgcagctcacctggggccagttgcgccagctccagcacatcttgctgctttccggtttccagtgcctgttccatcatcgcattgcgtagcgattccggcgtgaccagaaagcgtaattgtccgcgctttccgcgtcctgactgcgcctgccactccagccatcccgcctcctgtgcctgacgcaacagcgtacgaacatggcgttcgctgcaaaaacagcgttcggccagttcgctgacggtgacggtttgcggctttccggcggaaggttgccacagacgttgatactggttaagacggttgagcaatcgcatataaacccggaacaatattatttaactattcactattacttccgtatatatcaggtgatactcaatcaccattaaccgtgtcacagagtggagaaagaaatggctcgtctggcagcatttgatatggatggcactttattgatgcctgaccatcatttaggtgagaaaaccctctctactttggcgcgactgcgtgaacgcgacattaccctcacttttgccacggggcgtcatgcgctggagatgcagcatattctcggggcgctatcgctggatgcgtatttgattaccggcaacggaacgcgcgtgcattctctggaaggtgaacttttacatcgtgatgatttacctgcggatgtcgcggagctggtgctgtatcagcaatgggatacccgagccagcatgcatatcttcaatgacgacggttggtttaccgggaaagagatccctgcgttgttgcaggcatttgtctatagcggttttcgttatcagataatcgatgtcaaaaaaatgccactcggcagcgtcaccaagatctgcttctgtggcgatcacgacgatcttacacgcttgcagatccagctatacgaagcattaggcgagcgtgcacatttgtgtttttccgccacggattgcctcgaagtgctgccggtgggctgcaataaaggcgctgcattgacggtgctgacccaacatttaggtttatcgttgcgcgattgcatggcctttggtgatgcgatgaacgatcgcgaaatgttagtcagcgtcggtagcggatttattatgggcaatgcgatgccgcaactgcgcgcggagctcccgcatttaccggtgattggacattgccgaaatcaggctgtctctcactatttgacgcactggctggactatccacatctaccttattcccccgaataacgagatcccttccagcaccgggcaattgcccggttttttttgcgttgaatttgtcattttgtgccgtggtgtttaaaccgcacagaataaattgtcgtgatttcacctttaaaataaaattaaaagagaaaaaaattctctgtggaagggctatgttagataaaattgaccgtaagctgctggccttactgcagcaggattgcaccctctctttgcaggcactggctgaagccgttaatctgacaaccaccccttgctggaagcgcctgaaacggctggaggacgacggtatccttatcggcaaagtcgccctgctggatccggaaaaaataggcctcggcctgaccgcttttgtgctgataaaaacgcaacatcacagcagcgaatggtattgccgctttgtcacggtggttaccgaaatgccagaagtgctggggttctggcgcatggctggtgaatacgattatctgatgcgcgtccaggttgccgacatgaaacgctacgacgagttttataagcgtctggtaaacagcgtgccggggctgtcggacgtcacttccagcttcgcgatggaacagattaaatacaccacttctttacccatcgaataaatatccagaatcaggtcaggacacaacgcgtgcgattatttgctcaattaagctggtatttccgtcgggaatggcgtcgctatctcggggctgtcgccttgcttgtcattatcgcgatgctgcaactggttccgccaaaagtggttggtattgttgtcgatggcgtgacagaacaacactttactaccgggcagatcctgatgtggatcgccaccatggtgctgattgccgttgtggtttatctcctgcgttacgtctggcgggtattgctgtttggtgcgtcttatcaactggctgttgaactgcgtgaagattattaccgtcagctaagccggcagcatcctgagttttacctgcgtcatcgcaccggtgacctcatggctcgtgcgaccaatgacgtcgatcgcgtcgtgtttgccgccggagaaggggtgctgacgctggtggattcactggtgatgggctgcgctgtgttgattatgatgtctacgcaaattagctggcagttgaccttattttccctgttgccgatgccagtgatggcgatcatgattaagcgcaacggcgatgctttgcatgaacgctttaagctggcacaggcggcgttttccagtcttaatgaccgcacccaggaaagcctcaccagtatccgcatgatcaaagcctttggtctggaagatcgccagtcggcgttatttgccgcggatgccgaagataccggcaaaaaaaacatgcgggtggcgcgtattgatgctcgtttcgacccgaccatctatatcgcgattggtatggcgaacttgctggcgattggcggcggtagttggatggtggtgcagggcagtttaacgctgggccagctcaccagttttatgatgtatttaggtctgatgatttggccaatgctggcgctggcatggatgtttaacattgtggaacgtggtagtgctgcgtacagccgtattcgcgcgatgctggcggaagcgccggtggtgaacgatggtagcgaacccgtgccggaagggcgtggcgaactggatgtaaatattcaccagttcacgtatccgcagactgaccatcctgcgctggaaaacgtcaatttcgccctgaaacccggtcagatgctgggtatctgcgggccgactggttccggcaaaagtaccctgttgtcgctcattcagcgtcatttcgacgtcagcgagggggatattcgctttcatgatattcctctgacgaagttacaactcgatagctggcgtagccgcctggcggtagttagccagacgccattccttttttctgacactgtggcgaataacatcgcgctgggttgcccgaatgccacccagcaagagattgagcatgtcgcgcggttagccagcgtacatgacgatattttgcgtctaccgcaaggttacgatacagaggtgggcgagcgcggtgtgatgctttccggcgggcaaaaacagcgtatctccattgctcgtgcgttattagtcaacgcggaaatcctcatccttgatgatgcgctttcggcggtggacggacgcactgagcaccagatcctgcataacctgcgtcagtgggggcagggaagaacggtaatcatcagtgcccatcgcctttctgcactgacggaagccagtgaaattattgtgatgcagcacggacatatcgcccagcgtggcaatcatgatgtgctggcacaacaaagcggctggtatcgcgatatgtatcgctatcaacaactggaggcggcgctcgacgacgctccggaaaatcgcgaggaggccgtcgatgcgtagttttagccaactgtggccgactctcaagcgcctgttagcgtacggttcgccgtggcgtaaaccgctggggattgcggtcctgatgatgtgggttgcggcggcggcagaagtcagtgggccgctgcttatcagctattttatcgacaatatggtagcgaaaaataacctgccgttgaaagtggttgcagggctggctgcggcgtatgttgggctgcaactgtttgccgccgggctacattacgcgcagtcgctgctgtttaatcgggcggcagtaggcgtagtgcaacagttgcgtaccgacgtgatggatgctgcgttacgccagccattaagcgagtttgatacccaacccgtcgggcaggtgatttcccgcgtcactaatgacactgaagtgatccgcgatctctacgttaccgtagtggcaactgtcctgcgcagtgccgcgctggtgggcgcgatgctggtggcgatgttcagcctcgactggcgaatggcactggtggcgataatgattttcccggtggtgctggtggtaatggtgatataccagcgttacagcacgccgattgtccgtcgtgtgcgcgcctatctggcggatatcaacgacggctttaacgaaatcatcaatggcatgagcgttatccagcagtttcgtcagcaggcgcgatttggcgaacgtatgggggaggccagtcgttcacactatatggcgaggatgcaaaccctgcgcctcgacggttttctgctgcgtccgctgctgagtctgttttcatcgctcattctttgtggcttgttgatgctgtttggcttctccgccagcggcaccattgaagtgggcgtgctgtatgcgtttatcagctatcttgggcgacttaacgaaccattaatcgaactgaccacgcaacaggcgatgctgcaacaggctgttgttgctggtgagcgcgtgtttgaactgatggacggaccgcgccagcaatatggcaatgatgatcgcccgttacagagtggcaccatcgaagtcgataacgtgtcatttgcttatcgcgatgacaatctggtgctaaagaacattaatctctctgtgccttcgcgcaattttgtggcgctggtcgggcataccggcagtggcaaaagcaccctcgccagtttattgatgggctattacccgctaacggaaggtgagattcgccttgatggtcgtccattaagttcgctaagtcacagcgcgctgcgccagggcgtggcaatggtgcagcaagatccggtggtgctggcggataccttcctcgccaacgtgacgctggggcgggatatctccgaagaacgcgtctggcaggcgctggaaaccgtgcaactggcggagctggcgcgtagcatgagcgacggtatttacacgccgctgggcgagcaggggaataatctctcagttgggcaaaagcaactgctggcactggcgcgcgtgctggtcgagacgccgcaaatcctgatccttgatgaggcaaccgccagcattgactccggtactgaacaggcgattcaacatgctctggcggcggtgcgtgaacataccacgctggtagtgattgctcaccgcttatcgaccattgttgatgccgacaccattctggtgcttcatcgtgggcaagccgtggagcagggcactcaccagcaactgctggcggcccagggacgctactggcagatgtatcaactgcaacttgcgggcgaagagctggcagccagcgtgcgtgaagaggaatcattgagcgcctgaatagcgcaatatttcatcgttggtgcaaaaatgtaacgcactgtgcactgtcatagtgcgttttcattttcaaacttcttaacttcctgctctctttctcgtttttcatttctggcacaccgcttgcaataccttcttcgtgtagcagaaccattaccgaattctgaccggaggggatctatgaagctggtgaccgtgataatcaaaccattcaagctggaagacgttcgtgaagcgttatcttccattggtattcagggcctgaccgtcaccgaagtgaaaggtttcgggcgtcagaaagggcatgccgagctgtaccggggggcggaatacagcgtcaatttcctgccaaaagtaaaaattgatgtggcgattgctgatgaccaactcgatgaagtgatcgatatcgtcagtaaggcggcttacaccggaaaaattggcgacggcaaaatcttcgtcgctgaattgcaacgcgtcattcgtattcgtaccggcgaagccgacgaagcggcgctgtaatctctggcacacagcaacaggaacgaaaaatgaagatagcgacgataaaaactgggcttgcttcactggcgatgcttccgggactggtaatggctgcacctgcggtggccgataaagccgacaatgcgtttatgatgatttgtactgcgctggtgctgtttatgactattccggggattgccctgttttacggtgggttgattcgcggcaaaaacgtgctgtcgatgctgacgcaggtgacggtgacatttgcactggtctgtattctctgggtggtttacggttactcgctggcgtttggtgagggcaacaacttcttcggcaacattaactggttgatgctgaaaaacatcgaactgacggcggtgatgggcagcatttatcagtatatccacgtggcgtttcagggatcgtttgcctgcattaccgtcggcttgatagttggggcgctggcggaacgaatccgcttctcagctgtgttgattttcgtggtggtatggctgacgctctcttacattccgattgcgcatatggtgtggggcggtggtttgctggcttctcacggtgcgctggatttcgcgggtggcaccgtggtgcacattaacgccgcaatcgccggtctggtgggcgcgtatctgataggaaaacgcgtgggcttcggtaaagaggcgtttaaaccgcacaacctgccgatggtcttcaccgggactgccattctctatatcggttggtttggctttaacgccgggtcagcgggcacggcgaatgaaatcgcggcactggcatttgtgaatactgtggtcgcaacggcggcggcaattcttggctggatcttcggtgaatgggcgctgcgtggtaagccttcactgctgggggcgtgttctggcgcgattgccggtctggtcggcgtgacgccagcctgcggctacattggggttggcggcgcgttgattatcggcgtggtagctggtctggcgggcttgtggggcgttaccatgctcaaacgcttgctgcgggtggatgatccctgcgatgtcttcggtgtgcacggcgtttgtggcattgtcggctgtatcatgaccgggatttttgccgccagctcgctgggcggcgtgggcttcgctgaaggtgtgacgatgggccatcagttgctggtacagctggaaagcatcgccattacgatcgtctggtccggtgttgtggcatttatcggctacaaattggcggatctgacggttggtctgcgtgtaccggaagagcaggagcgagaagggctggatgtcaacagccacggcgagaatgcctataacgcgtaacaagcactgcaaaaaacagccggacggttttcacctccggctatttttttaattgtgattacgcatcaccccttcctgaacggtcgaggcaaccagtacgccgtcttgggtataaaactcaccgcgcacaaagccacgtgcgctggacgccgaggtgctctccacgctatacagcagccattcattcaaattaaacgggcgatggaaccacatggaatggtcaatggtggcaatctgaatccccggttcgagaaaaccgatgccgtgcggctgtagagctaccggcaggaagttaagatcagaagcgtaaccgagcagatactgatgaacgcgcaggtcatccggcacgctaccatttgcgcggatccacacctgacgatgtggttctgcgacgtgacctttcagtgggttatgaaactccaccggacggacttccagcggacgatcgcagatgaatttatctttcagcactggcggcagcaggtgcgccagcgattgggcgatttgcgtttccgaaggtaggccatcaggcgctggcgcggacggcattgttttttgatgttcgaaacccgcttctggtgcctggaaagaggccgtcatataaaaaatcggtttgccgttttgaatagcagcaacccggcgggcgctgaagctgttaccgtcacgcagcgtttcgacatcataaataatcggcttcttactatcgccagggcgaagaaagtagctgtgaaacgaatgtaccagccgctcttcagggacggtctcttttgcagcatacaaggcctgacccacgacctggccgccaaacacctggcgtaaacctaaatcttcactctggccgcgaaagagtccttcctcaattttttccagatttaacaatgtcagtaaattttttagcgcctgactcatataactctccagtaacaaagctgccgcagcaagccaaagtgagttgagtataacgcaaatttgctactggtccgatgggtgcaatggtctgaattacgggctaattacaggcagaaatgcgtgatgtgtgccacacttgttgacgttactattttgttaaccactcttccggcgaggaaagttagcccgctggtgcattgataataaggagaaatgaatgaaactcgtgcacatggccagtggtttagcggttgcgattgcgttggcggcttgcgcagataaaagcgcggatattcagacgccagcaccggctgcaaatacgtctatttcagcaacacaacaaccagctatccagcaaccgaatgtctccggtaccgtctggatccgtcagaaagtcgcactgccgcctgatgctgtgctgaccgtgacactttctgacgcgtcgttagccgatgcaccgtcaaaagtgctggcgcagaaagcggtgcgtactgaaggtaaacagtcaccattcagctttgttctgccatttaacccggcagatgttcagccgaacgcgcgtattctgttgagtgcggcgattaccgtgaatgacaaactggtatttatcaccgataccgttcagccggtgatcaaccagggcggaactaaagccgacctgacattggtgccggtacagcaaaccgccgtgccggttcaggccagcggtggcgcaacgactaccgtaccttcgacttcaccaactcaggtgaatccgtcttcggcagttccagctcctacgcaatattaagcgacgttaaccctctccgcccggagagggttagtagttccagcgataacgctgcaagtcgatttgcccgcttcccgataccatcacaccttctgccagtaatgcctgtcgctgacgctgtaaatccggtccggttagcgaaattgtgccgtggcgattaaccacccggtgccagggtaaggtgctgccttcagggagacgctttaacacaccgcccacctggcgcgcggcgcggggcgatcccgccagtttcgccacatcaccgtaagtggtgacatagccttcgggaatagcggcgacgatttgccagacgcgttggggaaatgaatcttctttttccatcttttcttcctgaggtaatttttcagcataatctggaaaaacgcccgagtgaagtcgcattgcgcaagaaaccagcatctggcacgcgatgggttgcaattagccggggcagcagtgataatgcgcctgcgcgttggttctcaacgctctcaatgggggctctgttggttctcccgcaacgctactctgtttaccaggtcaggtccggaaggaagcagccaaggcagatgacgcgtgtgccgggatgtagctggcagggcccccacccatttctgcctcccaccgtttcgtcaaaaaatcccaacatggctaaactttaaccacaactgacgtcgcaagaattgtctggctgcgcagtacgcttcggaggtatgtctgatgaagtatgttgatggttttgtggttgccgttcctgccgataaaaaggatgcctatcgggaaatggccgctaaggctgcgccattgtttaaagagtttggcgcgcttcgtattgtcgaatgctgggccagcgatgtaccggatggcaaagtgaccgattttcgtatggcggtgaaagcggaagagaatgaagaggttgtctttagctggattgaatacccttcaaaagaggtccgcgacgctgctaatcaaaagatgatgtcggacccacggatgaaagagttcggcgagtccatgccgtttgacggcaagcgaatgatctatggcggattcgagtcaatcatcgacgaataggtagcgtgacgggctgtgcggcgtgccgtcagcccaaaaattcacaaatgttgctcggcccagcgtaagaaatcttctttcggtaatgccttgctgtagagccagccctgaccgtagtgcacgccatgctggcgtaaccactcttcttgtttactggtttcgattccctccgctaccattttcagtttcagtgtttttgccatttcgatgatatgcggcgtgacatttttatattccagcgcatcaacgaaagatttatcgatcttcagaatgtcgacatccagatcctgtaaataacttaaacttgaataccccgtaccaaaatcatcaagataaatttcatggcccgcctcccggtagcgagaaattatcggggcgctggttttcggatcggcaaactcgcgttcagtgagttcaagcgcgatctgtctgggattaacctgatagtgattgatcatgtcacgcagcaattgcgggattttttccgaggtgagcacgggggattcaagattgatcgaaatatgctgctgtggatgctgacgcagccagtcgcccatatcttcaaagacgcttcttataatcagtagcgtcaatggctcagaaaggcccgtttgctgtgccagcggaataaaactatctggtgacaaccaactaccgtctgtctgcggccagcgcgccagtgcctcagcaccgacaattttgccattggctaaggagacaatcggctgatagtgcacgcaaatatcacgattttcgatagcatcctgcagccgatgatgcggtgactgaatacggcgcaaaatacgcagcacaaacatcgctgccagcaggccaatcaccaacccgagcggtaaccaaataaagacttgccgatgccagcctttctgcaacattttcgttgaagcccatgtgatgatcgaaatattcatctccggtaagggcaggatatcgtaaatgattccattattttcgatatgctcaccgggtgttttttgtagcctggtaataattccctgagcaatttcatcgctgctggttatgacaacgttatgggcattgccaataatggcggcatcaatttgccatgagctatagggaatgacatcaataaaggaagcggggtcgatcatgacgacataatgtgccgttcccatggcgaccatgtaacggataatgcctaaatcgttatgcgatgttaaccagacacgataaccatctttcgaaattttacctggctcggggaaggtatcgggcggactttcatgctccagagacgaacactggggaacgttgttatcgatataagccacttcctgaatatagcgataactgtaagatacccgacgcatttccatgagatgggcttcgctacaggcagcgccttgccatctttccagctcctgcagcgcatctttcccttgtgtcgccaccttattggctcgaatagcgacgcgggaggaataggtatccagctcttcaataaacgatgtttctacctgctgatgggccagccagatgcttaagccgacaggcagcaatactgaaagaatcagtactcccgaaataaggccgaccagatgtcgtgttctcaccagcatatccttattaacacagtgtagggaaagtatatctgattgtggaaaaaggctggctggagataaggaggtagagctggtatttcatgaagtgatgggtggaaacgatcattgtcatttgaccaggcgcagagctttacgcctggtatgtaaccctaacttaagatgttgattcggcgcgagcgagggtaaaaatatcgtaaaaagacagttcacctttacggacgatcattttttgcagttgttccttatgaacatccgcgacacgcggagagttcaagatggcttcaaccagcgcggcaggtacaaagcgcgtgttgtaccattcgccgttatagcaaacgcggaaatccagcacgtcgatatcttcatagcggtagcgtgggtagacatcgaaaaagaagaaaccattaagcaggataaataatacaaccagtagccagacagagcctgacagcgtttcggactgcaacatcaccgccagggtggcaaaaaaagcaacgtacataccgataaacagccccggatgtttacggataaaactgatactaaagcggggtttgttgtcgcgtttttcgcgggtattcagagactcaatcgtttcggtcagcaggcgttgtatttcggtcatcgtttgccttcgtggtatctgcaactttccagggaacaccctattttaacgtgggaatagtagaggggaagtaacagatctaccacaattttgcataacagttgcgaaaagccgattacaattttttaattattctggctggattaccgcccacgacaacgttgtccgggacatcttttgtgacaactgcacctgaggctaccacgacgttatcaccaatggtcacaccagggttaatgaccgcgcgtccgccaatccagacgttattaccgatggtgacgggtttccccagttcagcaccgctattacgtgctacagggtcgatgggatgtgttgccgtgtagatatgaacgcctggtgccaacatacagttatcaccgatgcgaatagggcagacatcaagcatcacgcaatcgaagttggcgaaaaaattattaccgagaaaaatgttatagccatagtcacagcgaaacgttggctcaatataagcctctgtcacctgaccgaatagatcagcgagaatttgctggcgtaatgtgtgctcttccgccagggaatgattgtatcggtgaataagctgacgagcgcgcaggcgatcgcgagataacgtctcatctgccgagcgatacaactcaccagcaatcatcttttctttttctgtgctcattactgacctccggttgctgaaaatgcggcaacacagtaagacgaaaagtcagtgaagagaacgttcccattacatctgtgtgataaagatcacatagggtatgtcttcatggcgaaaaagtataaaattcttaataaacagccggttatagctccgaaagcgaattatttattagcgaataaatttccatactgaggaagggatcttgtcgtacagtttattcatggtcaattcggcgaggcggtgatctgcggctgagtaaaataccgccagttcattatctgataattcgtatttatttttctcgataacacgctccagcgtgtcaattgtctggcaacgacgtaaacgcattaaataatcggttttcgttaaaggtttttcggacatacttctacctatggttgtaataattctaacaagataaactcgcaggattctctttcgtcgcattgacaaaacaacggaatagtcgattacctgacttccgccatttctgaagatcctgcatattaataccataactactgaacaacataaaggtgtcatccagatattcgtcgatctgctcaatgagcttattgtcttcattatacttaattttgtaattaagtgcgaaggtcgcaatatgctcaatcagttcattcaactggaggttgatcgccgaggttgggtcgtttacccagccatgattgctttcttcaaggtttgcaaggcagtcatgatacagggtttcacagagaaacttaagctgtgcgatatcatgtcttttgggtgagtattcatccataacgcgtccccttcttagcggttgaactaacggacacctttcgggatggaaaaaacttactgacctggacttgccctctcgtttgttagcttaactataagccactctttgcaggttttcatcgcattattacgaaaaattacaattaggaaggaagcgggacaggactcactttttcatactagcattaacccgcagcaggtaaaagcagtttgctcgaactattcataacatttcaggattatcgccagatgaaattggtgacactaataccaggattgctctgaatatgacgtaataaccgaggaatgaataaagaattaccgcaaataattaagaatagcctctaaatgattatggattattaaatctattagcgctacttaatataaattaactaacaatcagtattttttatgaattttatccgtggttaatactggttttcgtatgagatcctgagttggtggttcaattactccttaatgttcgtaggttatgcataaaaaaggccgcttacgcggccttagtgattacacgttgtatcaatgatgatcgacagtatggctgtgctcgatatcttcattcttgcggctaaagcggcggcgaaccaccacaaagaataccggaacgaagaagattgccagtaccgttgcggtcaccatcccgcccattacaccggtacctactgcgttctgcgcgccggaaccagcaccagtactgataaccagcggcataacgccgaggataaacgccagcgaggtcatcaggatcggacgtaaacgcatccgcaccgcatcaagcgtcgcttcaatcagacctttaccttctttatccatcaagtctttggcgaattcgacgataaggatcgcgttcttcgccgacaacccaatggttgtgagcaggcctacctggaagtaaacgtcattggtcaggccacggaaggtggcagccagcaacgcaccgataacccccagcggaacgaccagcataacggagaacggaatcgaccagctctcgtacagcgccgccagacacaggaacacgacaatcaacgaaatcgcgtacagtgaaggtgcctggttgccggagagacgttcctgataggacatccccgtccagtcatagccaacaccggtaggcagtttgctcgccagttgttccatcagctccattgcttcaccggtacttttacccggtgccgcctggcctaagatttccatggatggcaggccgttgtaacgttccagacgcggcgaaccgtactcccaacgagaagaggagaacgccgagaatggcaccatctgaccatcagcagcacgaacataccagtcgccgatatcatccggcagcatacggtatttcgcttctgacatgacataaactttcttcacacgaccgcggtcgataaagtcgttcacatagctgccgccccatgcagcgcccagagtggtgttaatgtcgttgatagaaacacccagcgcctgcgctttttcctggtcgatatcaatcttaaactgcggggtatcttccagaccgtttggacgtacgctggtcaacatatcagggtgcttcgctgcttctgcaagcaactggttacgcgcctgagtcagtttttcgtgaccaaggccagcctggtcaatcagctcaaagtcaaagccggttgcagtacccagttccacgattgcgggcaggttaaaggcgaaaaccatcgcatctttgatttgcgagaaagcgcgtgttgcacgcatggtaatcgcttcaactttgttttcttcgcccggacgatcggcccagtccttcaaggaaacgaacgcaataccggtattctgaccacgtcccgcaaagccgaagccgttaacggcgaacaccgactcaacgttgttcttttctttggtcagatagtaatgcgttacctcattgagcactttctgtgtacgttcctgcgttgcacctgctggcagctgaaccatggtcataaacacgccctggtcctcatctggcaagaaggagcttggcagacgcacgaacagataggccatgccgaccacgatgatcagatacagcaccaggtaacgccccgtactgcgcagaataccgcctacgctgtcggtgtagtggtgcgtgctcttctcgaacatgcggttaaaccagccgaagaagccttttttaccttccccgtgatcgcctttggcaatcggtttcagcatggtggcacaaagagctggagtcaggatcaacgccaccagtaccgacagcgccattgctgaaacaatggtaatagagaactgacgatagatagcaccagtagaaccgccaaagaaggccatcggtacgaataccgccgacagtaccatcgcgataccgaccagagcgccctgaatctgccccatcgacttacgggtagcttcttttggcggcaaaccttcttccgccataacacgctcaacgttttctaccacaacgatggcgtcatccaccaacaggccgatggcgagcaccatcccgaacattgttagcgtgtttatcgagaagccaaaggcggcaaggacggcaaaggtcccgagcaataccaccggtacggcaatggtcggaatcaacgtcgcgcggaagttctgcaggaacagatacataaccaggaacacgaggatgatcgcttcgaccagcgttttaaccacttcgtgaatagagattttcacgaacggcgtggtgtcgtatgggtaaacaattttcagacccgacgggaagaacggttccatcttcgccagttcagcacggattgccgcagcggtatccagcgcgtttgcaccggtcgccagcttgatccccagaccggaagccggttggccgttaaactctgcgatgatgtcgtagttctcaccacccagctcaatcttcgcgacgtcacgcagcagcacgcgggaaccatcctgattcactttcagcaggattttgccgaactcttcagtagaggtcagacgcgtctgagcaataatagaggcgttaagctgttggcctttcaccggcggcgtaccaccgagctgacccgccgcaacctgggcgttctgcgctttgatggcggtaatgacatcaaccggcgttagctggaatttgttcagctcattcgggttcatccagatacgcatcgcgtactgtgaaccgaacaactgaacatcacccacgcccgacgtacggctgatggcatctttcatattcgccgccacgtagtcggagatatcctcctgcgtcatggtgccatcggtgttgataacgccgacaaccatcaggaagctgctggatgatttctcaacgctcaccccttgctgctgaacttcttgcggcagcaacggcatcgccagctgcagtttgttctgcacctgaacctgcgcgatatccgcatcagtaccagactcaaaggtcagggtgatttgcacggtacccgtggagtcactgttagaggacatgtacatcaggttatcgataccgttcatattctgttcgataacctgtgtcaccgtgtcctgcactgttttcgcatcagcgccggggtaggaggcggagatcgttactgccggcggtgcaatcgtaggatattgcgccaccggcagtttgaggatcgccagcccccctgccaacatgatgataatggcgatcacccacgcaaaaatcgggcgatcgataaagaaattaggcatgtcttaacggctcctgtttaagttaagacttggactgttcaggctgagcaccgcttgcggcttgctggttattatcagcggtaacttcttgtgcttttacctggacaccaggacgcactttctgcagcccacttattactacgcgatcgcctgctttcagaccttctgtcaccagccacttatcgccaatagcctggcttgcaacgatcggacgggtttccactttgtcatccgcgccaactaccagtacggtggcatcgccacgcggcgtacgggttacgccctgttgcgggactaaaatagcgtttggattaagcccttcttccagacgtgcgcgcacgaacatacccggcagcagagtgtgatccgggttcgggaagatagcgcgtagggtgatagacccagtggtctgatcaacggtaacgtcagagaattccagcgtaccgtcctgcgggaacttaatgccgtcactggtgatcagtgacactttggctttgccgttctcttgtttcagcgtgccattcgccagttcctgtttcaggcgcaggaagtcgttgctggactgggtcacatcaacgtagatcggatcaagttgctgcacggttgccagcgcagtcgcctgaccgttctgtaccaatgcgccttccgtcacgttcgacttaccaatgcgaccgctaatcggagaggtgactttggtgtaagccagattgatccgcgcagtttcaacggcagctttcgccgcagttaccgcagcattcgcctgttgcgcatcagccagagcctgatcgtactcttgcttactgatgtactgagtaccgagcagtttctgataacgattcaccgtcaattgcgcgatattggctgcagcctgggctttcgccagatcacctttcgcactgtcgtatgtcgcctgataggtcgcaggatcaatctgatagagagagacacctgcttcgatgtcgctaccttctttgaaattacgcttcaggataatcccgctaacttgaggacgaacttctgcgatccggtaggcactggtgcgacccggaagctcggttgtgatctgcagaggttcagttttgactgttactacgccaacggcgggcatctgctggccaccttgttgggcctgtttgtcgtcacatcctgttagggctaagctgcctgagagcatcagaacgaccgccagaggcgtaaaccctctgtttttgttcatatgtaaacctcgagtgtccgatttcaaattggtcaatggtcaaaagttaataaacccattgctgcgtttatattatcgtcgtgctatggtacatacattcacaaatgtatgtaaatctaacgcctgtaaattcacgaacatatggcacgaaaaaccaaacaagaagcgcaagaaacgcgccaacacatcctcgatgtggctctacgtcttttctcacagcagggggtatcatccacctcgctgggcgagattgcaaaagcagctggcgttacgcgcggtgcaatctactggcattttaaagacaagtcggatttgttcagtgagatctgggaactgtcagaatccaatattggtgaactagagcttgagtatcaggcaaaattccctggcgatccactctcagtattaagagagatattaattcatgttcttgaatccacggtgacagaagaacggcgtcgattattgatggagattatattccacaaatgcgaatttgtcggagaaatggctgttgtgcaacaggcacaacgtaatctctgtctggaaagttatgaccgtatagaacaaacgttaaaacattgtattgaagcgaaaatgttgcctgcggatttaatgacgcgtcgcgcagcaattattatgcgcggctatatttccggcctgatggaaaactggctctttgccccgcaatcttttgatcttaaaaaagaagcccgcgattacgttgccatcttactggagatgtatctcctgtgccccacgcttcgtaatcctgccactaacgaataaccctgaatctgactccaggatttttcctggacattttcgtcgttgctattctggttcactgcgtcgtgatattcttgcggtttgactttttcaggtcgttcttcaggttcagaaaccttcattcatcatgactatgttccagtattacaaacgatcacggcattttgttttttcagcatttattgcttttgtttttgtcttgttatgccagaacacggcgtttgcgcgggcgtcatcgaatggtgatctgccgacaaaagcggacctgcaggcgcaacttgactcactaaataaacaaaaagatctttctgctcaggacaaactggtgcagcaggatctgacagatacattagccaccctcgataaaatcgatcgcataaaagaagagacagttcagctacggcaaaaagtcgctgaagcgccggaaaaaatgcgccaggcgaccgcggcgttaacagcacttagcgatgtcgataacgacgaggaaacgcgcaaaattctgagcacgctgtcgttgcgccagctggaaactcgcgttgcccaggcgctggacgatttgcaaaacgcacaaaacgatctggcgtcttataacagccagctggtttcgttacagacgcagcccgaacgcgtgcaaaatgcgatgtataacgcttcgcagcagctgcaacaaattcgcagtcgtctggatgggactgatgtcggcgagacagccttacgtcccagccagaaagtgttaatgcaggcccagcaggcgttgctgaatgcggagattgaccagcagcgtaaaagcctggaagggaacaccgtcttgcaggataccttgcaaaagcaacgtgattacgtgacggcgaacagcgctcgtctggagcaccagttacaactgttgcaagaagcggtaaacagcaagcgcctgactttaaccgaaaaaacggcgcaggaagccgtctccccggatgaagccgcgcgtattcaggctaatccgctggtgaagcaggaactggaaattaaccagcagttaagtcagcgtctgattaccgcgactgaaaacggtaatcagttgatgcagcaaaacattaaagtcaaaaactggctggagcgggcgctgcaatcggaacgcaatattaaagagcagattgccgtcctgaagggcagcctgctgttgtctcgtatcctttaccagcaacaacaaacgctgccctcggcggatgaactggaaaacatgaccaaccgcatcgcggatttgcgtctcgaacagtttgaagttaaccagcagcgtgatgcactcttccagagcgatgcgttcgtcaacaaactggaagaaggtcacaccaacgaagtcaacagcgaagttcacgatgcgttattgcaagtggttgatatgcgtcgcgaattgctggatcaactcaacaaacagttgggtaaccagctgatgatggccattaacctgcaaatcaaccagcagcagttaatgagtgtgtcgaaaaacctgaaatccatcctgactcagcaaatcttttgggtgaacagtaaccgtccaatggactgggactggatcaaagcgttcccgcaaagcctgaaagatgaatttaagtcgatgaaaatcacggtgaactggcaaaaagcctggcccgccgtttttatcgctttcctcgctggtttgccgctgctgttgattgccgggctgatccactggcgtctgggctggctgaaagcgtatcaacaaaaactggcttccgctgtgggttccctgcgtaacgacagccagctcaacacaccaaaagcgatccttatcgacctgatccgtgcgctgccggtgtgcctgattattctcgcggttggcctgattctgttgaccatgcagctcaacatcagcgaactgctatggtcgttcagcaaaaaactggcgatattctggctggtgtttggcctgtgctggaaggtactggagaaaaacggcgttgccgtacgtcacttcggcatgccggaacagcagaccagccactggcgtcggcaaattgtccgcatcagtctcgcattgctgcctatccatttctggtctgtggtggcagaactttccccgctgcatctgatggatgatgtgctggggcaagcgatgattttcttcaacctgctgctgattgccttcctggtatggccgatgtgccgcgaaagctggcgtgataaagagtcgcacaccatgcgactggtcaccattaccgtgctgtcgataatcccgattgcgctgatggtgctgactgctacaggctacttctacactacgctgcgtctggcaggacgctggattgaaaccgtttatctggtgatcatctggaacctgctgtaccagacggtactgcgtggcttaagcgtagcggcgcggcgtatcgcctggcgtcgtgcgctggcgcgtcggcagaatctggtgaaagagggcgcagaaggtgctgaaccgccggaagaacccaccattgcactggagcaagttaaccagcagacgctgcgtattaccatgttgctgatgtttgcgctgttcggtgtcatgttctgggcaatttggtccgatttgatcaccgtgttcagctatctcgacagcatcacgctctggcattacaacggcactgaagctggcgctgcggtggtgaaaaacgtcaccatgggcagtctgttgtttgcgattatcgcctcaatggtggcctgggcgttgattcgcaacctgcctggtttactggaagtgctggtgctctcgcgactgaatatgcgccagggcgcgtcgtatgccattactaccatccttaactacatcattattgctgttggtgcgatgacggtgttcggatcgctgggcgtctcttgggataaactccagtggctggccgcagcattatccgtaggtcttggttttggtttacaagaaattttcggtaacttcgtctccggtttgatcattctattcgaacgtccggtgcgtattggcgatacggtaaccattggtagcttctcggggacggtaagtaagatccgtattcgtgcgacaacgattaccgatttcgatcgcaaagaagtgatcatcccgaacaaagcgtttgttaccgagcgtctgatcaactggtcgttgactgacactactacgcgtctggtgatccgtctcggcgtggcctatggctccgatctggaaaaagtgcgtaaagtgttactgaaggcggcgactgagcacccaagggtgatgcacgaaccaatgccggaagtcttctttacggcatttggtgccagcacgttggatcatgagctgcgtctgtatgtgcgtgaactgcgtgaccgtagtcgtactgtcgatgagctgaaccgtactatcgatcagctgtgccgtgaaaacgacatcaacattgcctttaaccagcttgaagtgcatctgcacaacgagaagggcgatgaggtgacggaagtaaaacgcgactacaaaggcgatgacccgacgccagcggtagggtaaaaacgaaagggggcaacatttagttgccccgagattgctaacaaagtgcgcgttgttcatgccggatgcggcgtgaccgccttatccggcctacgaaaccgcaagaattcaatatattgcaggagcggtgtaggcctgataagcgtagcgcatcaggcagttttgcgtttgcccgcaaccttaggggacatttagcgaccccatttatttctcacttttccgcctcatcatcgcgcgttaatttcttttcataatcacgctttacaatatccagcgcgcgcagcacggtactggcagggatctgattttcctccagcagcacaatcaaatcgacagccagtttgacatcgtcaggggcattttccagtgacatattctctccattgctagcgggttaaacgcgctaacctgttttcgattttttccagcgcatggcggcagcgtgccaggcgcgcttcataggcttccacttcacgatgcagcgtttgctgttccacgagatcggtcacccgcgccagacgggctctgcgttcggcaaccatctcacgtagccgccgctcaaaatcctgatgctgaatacgtttacgctgccagcgggcaattttcggtggtgcactgtcccactcgcgcaatgaccaggcggaggcttcacgcgcgatggcttccagttgtgccgccagatgttccgccagccaggccacttgcggcagctgttgctgctcaactgcatgacgaagcgcagccagattatcgcccgcctcgtcgagacaagcctgtagtgttgtcgcacgagtctgaaaaagatgcctgtcgaaacgagcacttagcgtggcgaactgtgacaccggggcacaacgctgacgcagcgtagcgagctgtccttccagtttttccagcagcagggcggttttcacgataagacctcaatgaaaatgataattgttatgctaaagtagccactctgtaagctgacaacactcaatatgcaacgaatcattttaatcatcattggctggctggcggtagtgctgggtacgctgggcgtggtattaccggtattaccgacgacgccgtttatcctgctggcggcctggtgctttgcccgttcttccccgcgctttcacgcctggttgctgtaccgctcatggtttggcagctatctacgtttctggcagaaacatcatgcgatgccgcgcggcgtcaaaccgcgggcgattttgcttattttgctcacgtttgccatttctctgtggttcgtccagatgccatgggtgcgcatcatgttgctggtaattctcgcctgtttgcttttctatatgtggcgaattccggtgattgatgaaaagcaagaaaagcactgaagcacaacaatcgcagttgcaattattgcgtacagccagtacattctggcgttttcgagcacaggcgcaggcggtcaaaggttaaacaactgttacttttgatacgtttaaaacgcgccgtgagtaccaccgtaacaagcaggcatacacttatgaccgcgactgcacagcagcttgagtatctcaaaaatagcatcaaaagcattcaggactacccaaaacccggcattcttttccgcgatgtcaccagcttactggaagacccgaaagcttacgctctcagcatcgacttgctggttgagcgttacaaaaatgcgggcattaccaaagttgtcggcaccgaagcgcgtggcttcttgtttggcgctccggtagctctgggtctgggcgttggctttgtaccggtccgtaaaccgggcaaactgccgcgtgaaaccatcagtgaaacttacgacctggaatacggcaccgatcagctggagatccacgttgatgccatcaaaccgggcgacaaagttctggtggtggacgacctgctggcaaccggcggcactatcgaagcgaccgttaaactgatccgtcgtctgggtggtgaagtggctgacgctgcgttcattatcaacctgttcgatctcggcggcgaacagcgtctcgaaaaacagggcattaccagctacagccttgtcccgttcccgggccattaattatcgccagtcttgtgctgcccacgctacggacagcacaagatgtgcattcagcctcgccgttctgacggggctgtgttagcattaccccttcgtgaatccaccttccagcgtttcagagcctgccaatgagttatcaggtcttagcccgaaaatggcgcccacaaacctttgctgacgtcgtcggccaggaacatgtgctgaccgcactggcgaacggcttgtcgttagggcgtattcatcatgcttatcttttttccggcacccgtggcgtcggaaaaacctctatcgcccgactgctggcgaaggggctaaactgcgaaaccggcattaccgcgacgccgtgcggcgtgtgcgataactgtcgtgaaatcgagcaggggcgctttgtcgatctgattgaaatcgacgccgcctcgcgcaccaaagttgaagatacccgcgacctgctggataacgtccagtacgctccggcgcgtggtcgtttcaaagtttatctgatcgacgaagtgcatatgctgtcgcgccacagctttaacgcactgttaaaaacccttgaagagccgccggagcacgttaagtttctgctggcgacgaccgatccacagaaattgccggtgacgattttgtcacgctgtctgcaatttcatctcaaggcgctggatgtcgagcaaattcgccatcagcttgagcacatcctcaacgaagaacatatcgctcacgagccgcgggcgctgcaattgctggcacgcgccgctgaaggcagcctgcgagatgccttaagtctgaccgaccaggcgattgccagcggtgacggccaggtttcaacccaggcggtcagtgcgatgctgggtacgcttgacgacgatcaggcgctgtcgctggttgaagcgatggtcgaggccaacggcgagcgcgtaatggcgctgattaatgaagccgctgcccgtggtatcgagtgggaagcgttgctggtggaaatgctcggcctgttgcatcgtattgcgatggtacaactttcgcctgctgcacttggcaacgacatggccgccatcgagctgcggatgcgtgaactggcgcgcaccataccgccgacggatattcagctttactatcagacgctgttgattggtcgcaaagaattaccgtatgcgccggaccgtcgcatgggcgttgagatgacgctgctgcgcgcgctggcattccatccgcgtatgccgctgcctgagccagaagtgccacgacagtcctttgcacccgtcgcgccaacggcagtaatgacgccaacccaggtgccgccgcaaccgcaatcagcgccgcagcaggcaccgactgtaccgctcccggaaaccaccagccaggtgctggcggcgcgccagcagttgcagcgcgtgcagggagcaaccaaagcaaaaaagagtgaaccggcagccgctacccgcgcgcggccggtgaataacgctgcgctggaaagactggcttcggtcaccgatcgcgttcaggcgcgtccggtgccatcggcgctggaaaaagcgccagccaaaaaagaagcgtatcgctggaaggcgaccactccggtgatgcagcaaaaagaagtggtcgccacgccgaaggcgctgaaaaaagcgctggaacatgaaaaaacgccggaactggcggcgaagctagcggcagaagccattgagcgcgacccgtgggcggcacaggtgagccaactttcgctaccaaaactggtcgaacaggtggcgttaaatgcctggaaagaggagagcgacaacgcagtatgtctgcatttgcgctcctctcagcggcatttgaacaaccgcggtgcacagcaaaaactggctgaagcgttgagcatgttaaaaggttcaacggttgaactgactatcgttgaagatgataatcccgcggtgcgtacgccgctggagtggcgtcaggcgatatacgaagaaaaacttgcgcaggcgcgcgagtccattattgcggataataatattcagaccctgcgtcggttcttcgatgcggagctggatgaagaaagtatccgccccatttgatcgtaagcacagcttacgttcgtcatccttaacgtgattgagagagaaacctatgtttggtaaaggcggtctgggtaacctgatgaagcaagcccagcagatgcaagaaaaaatgcagaaaatgcaggaagagatcgcgcagctggaagtcaccggcgaatctggcgcaggtctggtaaaagtgaccatcaacggtgcacacaactgccgtcgcgtagagatcgacccgagcctgctggaagacgacaaagagatgctggaagacctggtggctgcagcattcaacgacgcagcacgtcgtattgaagaaacgcagaaagaaaaaatggcctctgtatcctccggaatgcagctgccgcctggctttaagatgccgttctgatgcaaaccagcccgctgttaacacagcttatggaagcactgcgctgtctgccgggcgttggcccgaagtcggcgcagcgtatggcgttcacgctgcttcagcgcgatcgtagcggcgggatgcgtctggcgcaggcgctcacccgggcgatgtcggaaatcggccactgcgccgattgccgcactttcaccgaacaggaagtctgtaacatctgttcgaatccgcgtcgtcaggaaaacggtcaaatctgcgtggtggagagtccggcggacatctacgccattgagcagacggggcagttttcaggtcgttattttgtgttgatggggcatctgtcaccgctggacggcatcggtccggatgatatcgggcttgatcgtctggaacagcgtctggcagaggaaaaaatcactgaagtgatcctcgccaccaaccccacggttgaaggtgaagctaccgctaactacattgccgagctttgcgcgcaatatgacgtggaagccagccgaatcgctcatggcgttccggttggcggcgagctggaaatggtcgacggcaccacgttgtcacactcccttgccgggcgtcataagattcgtttttaagcaaacgagagcaggatcacctgctctcgcttgaaattattctcccttgtccccatctctcccacatcctgtttttaaccttaaaatggcattattgaggtagacctacatgaaaggacaagaaactcgtggttttcagtcagaagtgaaacagcttctgcacctgatgatccattctctctattccaataaagaaatcttcctgcgtgagcttatctctaacgcctccgatgcggcggacaagctgcgtttccgtgcgctctctaacccggacctgtacgaaggtgatggcgaactacgcgttcgtgtctctttcgataaagacaagcgtacgctgaccatctccgataacggcgtggggatgacccgcgacgaagtgattgaccatctggggactatcgctaaatccggtaccaaatcattcctcgaatccctgggttctgaccaggcgaaagacagccagctgatcggtcagtttggtgttggtttctactctgcgtttatcgtggccgacaaagtgaccgtgcgtactcgcgcggcaggcgaaaaaccagaaaatggcgtcttctgggaatcggctggcgaaggtgaatacaccgttgccgacatcaccaaagaagatcgtggtactgaaatcaccctgcatctgcgtgaaggcgaagacgagttcctcgatgactggcgcgtgcgttccatcatcagcaaatactccgaccatatcgcgctgccggtagagatcgaaaaacgcgaagagaaagacggcgaaaccgttatctcctgggagaaaatcaacaaagcgcaggcgctgtggactcgtaacaagtcggaaatcaccgatgaagagtacaaagagttctacaaacacatcgcccacgactttaatgatccgctgacctggagccacaaccgtgttgaaggtaagcaggagtacaccagcctgctgtacatcccgtcccaggctccgtgggatatgtggaaccgcgatcataaacacggcctgaaactgtatgttcagcgtgtgttcatcatggacgacgcagaacagttcatgccgaactatctgcgcttcgtgcgtggtctgattgactccagcgatctgccgctgaacgtttcccgtgaaatcctccaggacagcacggtaacgcgtaacctgcgcaatgcgctgaccaagcgtgtgctgcaaatgctggaaaaactggcgaaagacgacgcggaaaaataccagaccttctggcaacagtttggcctggtactgaaagaaggtccggcggaagatttcgctaaccaggaagcgatcgccaaactgctgcgttttgcttctacccataccgattcttctgcgcagaccgtatctctggaagactacgtttcccgcatgaaagaagggcaggagaaaatctactacatcaccgcagacagctatgcggcagcgaagagcagcccgcacctggaactgctgcgtaagaaaggcatcgaagttctgctgctttccgaccgcatcgatgagtggatgatgaactatctgactgagttcgacggtaaaccgttccagtcggtgtctaaagttgacgagtcgcttgaaaaactggctgacgaagttgatgagagcgcgaaagaagcggagaaagcactgactccgttcatcgaccgtgtgaaagccctgctcggcgagcgcgtgaaagatgtccgtctgactcaccgtctgaccgatacgccagcgatcgtttcgaccgacgcggacgaaatgagcactcagatggcgaaactgttcgctgcggcgggccagaaagtgccagaagtgaaatacatcttcgaactgaacccggatcacgtactggtgaaacgtgcggcagatactgaagatgaagcgaagttcagcgagtgggtagaactgctgctggatcaggcgctgctggcagaacgcggcacgctggaagatccgaacctgtttattcgtcgtatgaaccagctgctggtttcctgatgtaatgccggatgaccttcgtgtcatccggcatttttcttttcatcatctgcactttccgcaaattatctcgccattaaccgtttcagccccaggtgcctttcttgaggcaatcgcctgttggtggtatcgtttatcgctttttcaaaaaattcgacacattttaaggggattttcgcaatgcgtatcattctgcttggcgctccgggcgcggggaaagggactcaggctcagttcatcatggagaaatatggtattccgcaaatctccactggcgatatgctgcgtgctgcggtcaaatctggctccgagctgggtaaacaagcaaaagacattatggatgctggcaaactggtcaccgacgaactggtgatcgcgctggttaaagagcgcattgctcaggaagactgccgtaatggtttcctgttggacggcttcccgcgtaccattccgcaggcagacgcgatgaaagaagcgggcatcaatgttgattacgttctggaattcgacgtaccggacgaactgatcgttgaccgtatcgtcggtcgccgcgttcatgcgccgtctggtcgtgtttatcacgttaaattcaatccgccgaaagtagaaggcaaagacgacgttaccggtgaagaactgactacccgtaaagatgatcaggaagagaccgtacgtaaacgtctggttgaataccatcagatgacagcaccgctgatcggctactactccaaagaagcagaagcgggtaataccaaatacgcgaaagttgacggcaccaagccggttgctgaagttcgcgctgatctggaaaaaatcctcggctaattcgaaagcgcgcacggacagtcccctcgccccctcggggagagggttagggtgaggggaacaggcccgcacaagcaaacttatcagcaatctcaggccggatattcattcggccttttacaaaaacctcaatctgcgctattcttttttctgatttgacctctcacagcaattagttcttcttcctcacttttccgctacaattatcaacaagttgaatcgataagaggcggtaatgcgtcagactaaaaccggtatcctgctggcaaacctgggtacgcccgatgcccccacacctgaagcggtaaaacgctatctgaaacaatttttaagcgacagacgcgtggttgatacctcacggttgttatggtggccattgctgcgcggcgtgattttgccgctgcgctcgccgcgtgtggcgaagctgtatgcctctgtctggatggaaggtggctcgccgctgatggtttacagccgccagcaacagcaggcgctggcacaacgtttaccggagatgcccgtagcgctgggaatgagctacggctcgccatcactggaaagcgccgtagatgaactcctggcagagcatgtagatcatattgtggtgctgccgctttatccgcaattctcctgttctacggtcggtgcggtatgggatgaactggcacgcattctggcgcgcaaacgtagcattccggggatatcgtttatacgtgattacgccgataaccacgattacattaatgcactggcgaacagcgtacgcgcttcttttgccaaacatggcgaaccggatctgctactgctctcttatcatggcattccccagcgttatgcagatgaaggcgatgattacccgcaacgttgccgcacaacgactcgtgaactggcttccgcattggggatggcaccggaaaaagtgatgatgacctttcagtcgcgctttggtcgggaaccctggctgatgccttataccgacgaaacgctgaaaatgctcggagaaaaaggcgtaggtcatattcaggtgatgtgcccgggctttgctgcggattgtctggagacgctggaagagattgccgagcaaaaccgtgaggtcttcctcggtgccggcgggaaaaaatatgaatatattccggcgcttaatgccacgccggaacatatcgaaatgatggctaatcttgttgccgcgtatcgctaaagctgagcggtaaagaactgagcgccgtcgcgaagagcctcgtcggcggttttcatcatccgtgaataatgcaaaaaggcgtgcagcgtgcctgggtagagtttgaactcacagggctgctgatgcgccgctaacgtctggtaaagcagacggctgtcatccagcagcggatcgaactccgccccggcaataaaacagggcggaacttcgcgagtgagatcattattaaacagacagtaatacggcgactcgcggtccgcgtcgttgcttaaatatgcctcttcgtacatctgcaaatcctgttgcgttaagccatcccagacaccgcccaacagacgacgagtcacggaatcccgtaatccgtaaagcccataccacagcaaaacgcccgcaactttaccgcaatcgatctgtttatcacgcaaccacaacgcactggcgagcgccagcatggcacctgcggaatcaccggcaaagccaatgcgggacatattgatttgataatcctccgcctgctggtggaaataacaacaagcagccacaatttcctctatcgcttgcggaaaacgcgcttcaggtgaaagggtgtaatcaataccaatcaccgtacattggctgtagcttgccagcaggcgcatgatgcgatcgtgggtatcgagattgccgagaataaaaccgcctccatgcaaataaaatagcgtcgctgggctatctggctgcggacaaaagagacgtgtttccacctgcccatattttgttggaaccatgtaagctctggttgccatttctggagcgcccgcattccagaatcggcgctcaagcgtgtaatactgtcgttgctcagcaatcgttcccgttgcgggccagggcggtaaatccggctgaagagtattcacaacggtcttcatttcagcagaaataaggtccagaacaggtagtttgttttccggcttcatacaaaaactcctttcaaattacgtcattgtaaggaaccactgccatgaaaatgcgatcccgcctgctgatattgaaactggctgcgtctcgcgcgctcccgtcagattgtgttaacattcgccgctcagttaaccacccgtaaaaacaaccatgaaatttcccggtaaacgtaaatccaaacattacttccccgtaaacgcacgcgatccgctgcttcagcaattccagccagaaaacgaaaccagcgctgcctgggtagtgggtatcgatcaaacgctggtcgatattgaagcgaaagtggatgatgaatttattgagcgttatggattaagcgccgggcattcactggtgattgaggatgatgtagccgaagcgctttatcaggaactaaaacagaaaaacctgattacccatcagtttgcgggtggcaccattggtaacaccatgcacaactactcggtgctcgcggacgaccgttcggtgctgctgggcgtcatgtgcagcaatattgaaattggcagttatgcctatcgttacctgtgtaacacttccagccgtaccgatcttaactatctacaaggcgtggatggcccgattggtcgttgctttacgctgattggcgagtccggggaacgtacctttgctatcagtccaggccacatgaaccagctgcgggctgaaagcattccggaagatgtgattgccggagcctcggcactggttctcacctcatatctggtgcgttgcaagccgggtgaacccatgccggaagcaaccatgaaagccattgagtacgcgaagaaatataacgtaccggtggtgctgacgctgggcaccaagtttgtcattgccgagaatccgcagtggtggcagcaattcctcaaagatcacgtctctatccttgcgatgaacgaagatgaagccgaagcgttgaccggagaaagcgatccgttgttggcatctgacaaggcgctggactgggtagatctggtgctgtgcaccgccgggccaatcggcttgtatatggcgggctttaccgaagacgaagcgaaacgtaaaacccagcatccgctgctgccgggcgctatagcggaattcaaccagtatgagtttagccgcgccatgcgccacaaggattgccagaatccgctgcgtgtatattcgcacattgcgccgtacatgggcgggccggaaaaaatcatgaacactaatggagcgggggatggcgcattggcagcgttgctgcatgacattaccgccaacagctaccatcgtagcaacgtaccaaactccagcaaacataaattcacctggttaacttattcatcgttagcgcaggtgtgtaaatatgctaaccgtgtgagctatcaggtactgaaccagcattcacctcgtttaacgcgcggcttgccggagcgtgaagacagcctggaagagtcttactgggatcgttaagttatcgtcggttcgtaggccagataaggcgttcacgccgcatctggcatttggctctcgatgcctgatgcgacgctggcgcgtcttatcatgcctacatatttttcatattttacatccggcaaccaccgtttaccccgtcaccacctcacccgccggtggcgtttccagcagttccagcatggtacgggcgatttcacgctcgcccatcactacctgattcgcaccacgttcggtgatatacgccacttcatcgtcataatgggcgcgggcaataatctcaatatccggatttttcgcgcgggcagatgccacaatctcacccgcttcataaccgttgggaatcgtcaggatcagccattttgcacattccagatgcgccagttgcataatttcttcgttcgccgcattgcccaatactgcgcggaccccgcgctctcgcagctcatcaacacgggttcgtgacgtctcaatcaccaccagcggaatatcagaggcgagcaatttctcccccagcaggctgcctacacgaccgtaacccaccagtagcgcatggttgcaaatatccactgggatctgcttctcttcttcgattgcctcttccagcgtctgctcttccagcgtttcggtcttcgccagatatttctccagtagtgcgaacagtaccgggttgagcataatcgacaggatcgcccctgccagtaccaggttttgtccggcctgcggcagtaaattcaatgccattcccagtcccgccaggataaacgcgaactcaccaatctgcgccaggctggcggcgatggttaatgccgtacgttgggagtgaccaaacagtcgcaccaggaaaaatgcggctaacgacttaccaaacagaataatcgccagcgtcgccagcactgccagcggttgctgaatcagaattaacggatcaaacaacatcccgacggagacaaaaaacagcaccgcaaacgcgtcgcgcaatggcagcgtatcgtgggcggcacggtgactcagttcagactcgttcagtaccatcccggcaaagaacgcaccgagtgcaaaggagacatcaaacagctctaccgcaccaaaggcaacccctaacgccagcgccagcaccgacagggtaaacagctcgcgagaaccggttgccgcgctgcgtgccataatccacggcaccagacggcgacctaccagcatcataatggcgataaatgcgatcactttgccgatggtgatccccatatcgactgcaagagtggcaaagcccacatcgccctgttccatcattcctgccactgcgggcagcaacaccagcgtcagaaccattaccaggtcttccacaatcaaccaaccgatggcgatttgcccacgctgactgtcaattaattgccgttcttcaagtgcgcgcagtaacaccacggtactggcggtggaaagacataaaccgaacacgataccggtcattaacgaccagcccagcacggcagagagcgccatacccagcagcgtcgccacggctatctgggcgatcgcaccgggaatggcgatggcctttaccgccatcaaatccttcagcgaaaagtgcaaaccgacgccaaacatcaacagaatgacgcccagttcagccagttccggggcaagcttggtatcggcaacaaagcccggagtgaatggtcctgccagcacacccgctaacagatatcccaccagaggagaaatacgtagtttattggccagcatgccgaggataaaggcgagcacaaggccgccaacaatggtggtgataagcggggtggcgtgatgcattccgtctccttttcctggtggttattgtccatttttggccgggaaaaccaaaattacaggtaatagtttatgacaatttcattgatgatgttcatgaataattattgaattttgcagaaaaatggaattagctgcaaaaaaagcacggatcggaaaacagaaggcggtttaacagaggaaaggcttatggcgactgtaaaacgatgcagccaaagtttgcctttggctgcaatgaaatcagtctttatgccggttatcaggcaggaatatggtcaacatccccaatagtggcaggaaagcacagattttatagactaactcgatgctggtgtgatcggcgataagccccagaactgccgctcccagacctcccatgccaaaagcaaaaccgaaaaagagtccagaaaccataccgatacgtcctggaagcagctcctgagcgtagaccagaatggcagagaatgccgaagcgaggataaatccaataatcaccgttaaaacccccgtccagtgcaggctggcgtagggtaaaatcagcgtaaacggcgcaacgccgaggatagagccccaaatcacatatttccgcccaattttatcccctacaggcccgccgatcaccgtacctgccgcaacggcaaacaggaaggcaaacagatgaagctgagcattctggatagataatccgaatttttgcatcagataaaaggtgtaatagctgctgatgctcgccatatagaaatatttcgagaaaatgaggattaacagaatgctgaccgccagtacaactttattgcgcggcagtggattgataatcgtcgctttgggttttcctttattcattcggtgctgtgccgagtaccaacggctgatttgcgccaacaccacgatcgccagcagtgccgcaagcacaaaccaggcaacgttgcctttgccataaggcgcgataatcaccgccgccagcaagggtcccagggaactgccaaagttgccgccgacctgaaagatagattgcgccaggccatgccgcccgccggaagccatacgggccacgcgagaagattccggatgaaagaccgatgaaccggtaccgaccagcgccgccgccagcagaactgcgccaaaactgcccgccagcgcaagcagcaccagaccgcttaaggtaaagcacatgccaattggcaacgaccatggcatcggatatttatcggtccagtagccgaccactggttgcagtagcgaagaggcgagctggaaggtgagggttatcatgccaatctgcataaatgtcagagaaaattctgactgaagcagcggataaatcgccagaatcagcgattggatcatgtcgttcagcagatgtgagaggctgatagcacctaaaataccaaacgatgttcgggccttggtcgttgacgcagccgcgcccgccacaggctggggttgttcactcattgccataggaaagtcactttttcagggttgcgatgtaaagaatgatcttatttgtgattattaccagactaacatacctgtatgcgtcgtctgaaggaagtctcaacgccgaatacagaatttctaatctggatgcagatttatcttcaccggacgcagacttgtctatgatgtcgcgtcatactatttttcaacacgttgaaatcaggtcagggagagaagtatgaaattattgcagcggggcgtggcgttagcgctgttaaccacatttacactggcgagtgaaactgctctggcgtatgagcaggataaaacctacaaaattacagttctgcataccaatgatcatcatgggcatttttggcgcaatgaatatggcgaatatggtctggcggcgcaaaaaacgctggtggatggtatccgcaaagaggttgcggctgaaggcggtagcgtgctgctactttccggtggcgacattaacactggcgtgcccgagtctgacttacaggatgccgaacctgattttcgcggtatgaatctggtgggctatgacgcgatggcgatcggtaatcatgaatttgataatccgctcaccgtattacgccagcaggaaaagtgggccaagttcccgttgctttccgcgaatatctaccagaaaagtactggcgagcgcctgtttaaaccgtgggcgctgtttaagcgtcaggatctgaaaattgccgttattgggctgacaaccgatgacacagcaaaaattggtaacccggaatacttcactgatatcgaatttcgtaagcccgccgatgaagcgaagctggtgattcaggagctgcaacagacagaaaagccagacattattatcgcggcgacccatatggggcattacgataatggtgagcacggctctaacgcaccgggcgatgtggagatggcacgcgcgctgcctgccggatcgctggcgatgatcgtcggtggtcactcgcaagatccggtctgcatggcggcagaaaacaaaaaacaggtcgattacgtgccgggtacgccatgcaaaccagatcaacaaaacggcatctggattgtgcaggcgcatgagtggggcaaatacgtgggacgggctgattttgagtttcgtaatggcgaaatgaaaatggttaactaccagctgattccggtgaacctgaagaagaaagtgacctgggaagacgggaaaagcgagcgcgtgctttacactcctgaaatcgctgaaaaccagcaaatgatctcgctgttatcaccgttccagaacaaaggcaaagcgcagctggaagtgaaaataggcgaaaccaatggtcgtctggaaggcgatcgtgacaaagtgcgttttgtacagaccaatatggggcggttgattctggcagcccaaatggatcgcactggtgccgactttgcggtgatgagcggaggcggaattcgtgattctatcgaagcaggcgatatcagctataaaaacgtgctgaaagtgcagccattcggcaatgtggtggtgtatgccgacatgaccggtaaagaggtgattgattacctgaccgccgtcgcgcagatgaagccagattcaggtgcctacccgcaatttgccaacgttagctttgtggcgaaagacggcaaactgaacgaccttaaaatcaaaggcgaaccggtcgatccggcgaaaacttaccgtatggcgacattaaacttcaatgccaccggcggtgatggatatccgcgccttgataacaaaccgggctatgtgaataccggctttattgatgccgaagtgctgaaagcgtatatccagaaaagctcgccgctggatgtgagtgtttatgaaccgaaaggtgaggtgagctggcagtaatccgaaagtgccggatgtttgcatccggcacaatgcttaatcgcggcgggcgatatcagcaaatttggcatcgaggatctttgccagatcgcctgccgccagttcgatatccagtccgcgcttgccgccggaaacataaatagtggcaaattcttgtgcgggggcgtcgataatcgttggcagacgttttttctgccccagtgggctaatccccccaaccaggtatcccgtcgaacgctgcgcgaccatcggatcggccatctcaactttcttggcacccagcgcttttgctacttttttaagatccagttgacctgcgaccggcgtaacggccacggcaaggtgtttcatatcaccgttcactgccaccagcagcgttttgtagacctgatccggattcaaacctaattttttgacgacttcatcgccaaaattggtttcagccggatcgtgctcgtaggtatggatttgaaacgaaatcttgtttttttcgagtaatttaactgcgggtgtcatggtaattttcctgccttaaacaaaaaaacgaagcaagcatacgcctgatggcggtccaaaaaaaagagtcatcttgcctaagagtattggcaggatggtgagattgagcgacaatcgagttacaccgtcgcttaaagtgacggcataataataaaaaaatgaaattcctctttgacgggccaatagcgatattggccatttttttagcgcaacatttgcggcaaattcccttctccatacaggtgtagtgcaccgaccgcgaccacatatcgccccggcggcatggcgcgtaatttatcccgccaggcgagatttcgctgatgcatcagcacatcgtacagcgactgactgaacgtattgggcagcgttatatcattattttgcggcggtgcattcagccaccagctcatcatttgttgcagcaaccgtgcgttggtatgccagtgggtcagcgtatcgtccagcagcgccagtcctttgtcagggagctggagcaacatggcaatctggttttcagccccttccagttcaatcacgggtttatgttgttgcttcgccgcctgcaatagctggtaatcgataccgtattctgcccgcagccccagtttttgtgcctgcgtcgcctgaagaaccatcgcgatttgccacagcggttgggtagaaaagagtgagggagaaatgcccatctcctggctaatgtgctgcaggttttggagttgctcctcgctaatgcgctcttccagcgcctcgcaggcaggcaaattagcaaaaggcgtatcgctggtggaaacatccgcctcgacgatcagcgcatcggcgtttttgagctttttgagcaaacgggtgggcaggggagccatatcgtggctacccatatgaatactgccaatcagatgaaaatggcgattgccggggagggtgatatcgatggcaggccaggtgtaatgattaccgcgcagcgcggcccaaagcgtttttacccggtacaacagatccatacgacctccctttgtgaaatatcatgctagcgcgcggtgagggatggcgcaaatggagttggagacttgtttaatgtgtttgtatgattcagtatgttcttgcatcgctattcacaaggaagcaacagttaaaaaccatgaaacaggcaacaagaaaaccgacgacacccggagatattcttctctatgaatatctggaaccgctcgatttgaaaatcaatgagttagcagagttgctgcatgttcatcgtaatagcgtcagtgcactgatcaataacaatcgtaaactcactactgagatggcatttcgtctggcgaaagtttttgataccacagtcgatttttggctaaacctccaggcggcggttgatctttgggaagttgaaaacaacatgcgcacccaggaagaattgggacggattgaaacagtggctgaatatttggcacgccgtgaagagcgtgcaaaaaaggtcgcgtaaggccaaaacatcgcttcatctcgtaggccggataaggcgttcacgccgcatccggcatccgagcaccattgcctgatgcgacgcttacccgtcttatcaggcctacaaacttgtgcctgaaccgtaggccggataaggcgtttacgccgcatccggcatccgagcaccattgcctgatgcgacgcttacgcgtcttatcaggcctacaaacctgtgcctgaaccgtaggccggataaggcgtttacgccgcatccggcagtcatgcgtcgatgccaaatgcgccaccctaaagcagcgcatccgcaatgatgtacttattccttcggtttaaaccgcagcaaccggttggcgttactcactacggtaatcgacgagagcgccattgccgctccggcaactaccgggttaagcagtgttccagtgaacggccacaaaataccggcggcgaccggaataccgatactgttgtagataaacgcaccgagcaggttctgcttcatgttgtgcagcgttgcgcgggaaatagcgagcgcatccgcaacgcccatcaggctatggcgcatcagggtaatcgccgcggtttcaatggcaacatcactgccgccacccatcgcaatgccgacatccgcctgagccagcgctggcgcgtcgttaatgccgtcgcccaccattgccacctgacgtccttcactttgcagatgtttgatcgcttcggctttaccgtccggcagcaccccggcgatcacctcatcaatccctgcttctttggcgatcgcattggcggtggttgggttatccccggtcaacatcaccagacgatatcccgctttatgcaggcgttgcagcgccgccacgctatcactacgcaacggatcgcgtactgccagcagggctaccgctttcccgtcaaccgccagcagcacaggcgttgccccttgcgatgcctgagcagtaatctccgcttcgatagctttggtaccaacctgttgctcatttaacagcgcctgattgcccagcaataacgcatgaccttcagcttcaccgctcacgcccagcccgcgcaatgtgcggaaaccgttgacctgcggtagctgcatatcacctgctttatcgaggatcgctcgtgccagcggatggctggaaccttgctccagtgccgccgccagacgcaatgcctgcgcttcatcaacatcagcaaatgttttcactgcgacaacctgcggcttcccttcagtcagcgtcccggttttatcgaacactacagtgtcgagtgtactggcgcgttgcagcgcgtcagcgtcccgcaccagcacgccaaactcagccgcccgcccgacgccggaaataatcgacatcggcgtcgccagccccagcgcacacggacaggcaataatcagtaccgtggtggcaatcaccagggtatagacaatctgcggtgccggaccaaagaaataccagattgccgcactgacaagcgcaataaccaccactaccggcacaaatacggctgagattttatccgccagctgaccgatttctggcttgctgctctgggcctggcgcaccatgcgaatgattcgtgacagcgtagtatggctgccaaccgcactggcacgaaacagcacactgccgtcctgtaccactgtcccggcatggacgctatcgccttcgcctttttgctgcgggattggttcgcccgtcagcatcgcttcatccagccatgcttcgccctgggtaatctcgccatctaccggcacgcgatcgccggtcgtcaggcgcagcaacatacctggctgcacttctgccagaggcacgcttttttcaccttcgtcagtaaccaggcgtgccgtcggcggggttaaatcgagtaacttttccagcgccttagaagaacgctggcgtgcgcgcgcttccagcatatggccgagattgatcagaccgataatcatcgcgctggcttcgtaataaagatgtcgcgcttccatcgggaaccactgcggccacaggttgacgctcatcgaatagagccacgccacgccagtacccagcgccaccagcgtatccatcgtcgccgcaccgttcagcaggcttttccatgcactgcggtaaaaatggccgccggcgaaaaccatcactgccagggttatcaggccgataaccaaccacaggctgcggttgtcagcggtgaccatcatgttatcgccgatcatcccccagaccatcaccgggatacccaccgccagtgcgacaattgcctgccagcggaagcgcttcatcgtagcgacggcggtttcttgctggcgctcgcggcgtttagcgtcatcttcaatcgcttccgcgccgtagcccgctttttccaccgcctgcactaaatcttgtggggaggcactgcccatcaccagcgcagtacgctccgccaggtttacccgtgcctgagtgacgcccggtacgctttgcagcgcattttgtacgcgggtgacacagctggcgcagctcatgccgctcagcagcaactgctggctgtcatcgtcatcggcggtcgctgccggaagcgcctcagaaaccgctgtcagtgcttccgacgggattgatgactccgccagcggtttagcctttgggtggcttacagatgcgtcataacccgcttgtttgatggtttcgatcagctgttctgcactggcagtcccggtaacgtgcgcttcagtgatagacacatccgcctgctcaacatccggacgctgttcaagactttctttcacgcgtttaacgcagtgaccgcaggacaggccgtccagggtcaggtcgatagtttgtgacataaaacactcctttaagacagttttgactggctgtgataaaggttaaaccttccagcaaggggaaggtcaagaaattaataaaccaggcgggtaaaagtctgtaaagattaaaaaatcggctcgatttgcatcaggattagacatttatctctttgttttcctgtagttaagttgcgggtgctaagttaaatcaggatgcctgaaaatcggcaccggggtgaggaattacctcccgcatctataaaaaggagttaacaaaagatgttagatgcaaacaaattacagcaggcagtggatcaggcttacacccaatttcactcacttaacggcggacaaaatgccgattacattccctttctggcgaatgtaccaggtcaactggcggcagtggctatcgtgacctgcgatggcaacgtctatagtgcgggtgacagtgattaccgctttgcactggaatccatctcgaaagtctgtacgttagcccttgcgttagaagatgtcggcccgcaggcggtacaggacaaaattggcgctgacccgaccggattgccctttaactcagttatcgccttagagttgcatggcggcaaaccgctttcgccactggtaaatgctggcgctattgccaccaccagcctgattaacgctgaaaatgttgaacaacgctggcagcgaattttacatatccaacagcaactggctggcgagcaggtagcgctctctgacgaagtcaaccagtcggaacaaacaaccaacttccataaccgggccatagcctggctgctgtactccgccggatatctctattgtgatgcaatggaagcctgtgacgtgtatacccgtcagtgctccacgctcctcaatactattgaactggcaacgcttggcgcgacgctggcggcaggtggtgtgaatccgttgacgcataaacgcgttcttcaggccgacaacgtgccgtacattctggccgaaatgatgatggaagggctgtatggtcgctccggtgactgggcgtatcgtgttggtttaccgggcaaaagcggtgtaggtggcggtattctggcggtcgtccctggagtgatgggaattgccgcgttctcaccaccgctggacgaagatggcaacagtgttcgcggtcaaaaaatggtggcatcggtcgctaagcaactcggctataacgtgtttaagggctgatcatgatgaacacggaaggtaataacggtaacaaacctctcggtctatggaacgtcgtttccatcggcattggggcaatggtgggggcggggatcttcgcgctgctggggcaggctgcattgctaatggaagcctcgacctgggtcgcctttgcttttggcggtattgtggcgatgttttccggttatgcctatgcgcgtctgggggcgagctatcccagcaatggcggcattatcgacttctttcgtcgcggattaggcaacggcgtcttttcgctggcgctctcgttactgtacctgttgacgctggcggtgagcatcgccatggtcgcccgtgcttttggcgcttatgccgtgcagtttttgcatgaaggcagccaggaggagcaccttattttgctctacgcgttggggatcattgcggtgatgacgcttttcaactccttaagcaaccatgcggtagggcggctggaagtgatcctcgtcggcattaaaatgatgatcctgttattgctgattattgccggtgtctggtcgctgcaaccggcgcatatttccgtctctgcgccccccagctccggtgcgttcttctcctgtattgggataactttccttgcctatgcgggctttggcatgatggcgaacgcggcggataaagtgaaagatccgcaggtcattatgccacgggcgtttctggtggcgattggcgttaccacgttgctttatatctcgctggcactggttttgcttagcgatgtatcggcattagagttagaaaaatatgccgataccgccgtagcgcaggctgcttctccgctgctcgggcatgtgggttatgtgatcgtcgtcatcggcgctttactggcgacggcttcagccattaacgcgaacctgttcgccgtgtttaacatcatggacaacatgggcagcgaacgcgaactgccgaagctaatgaataaatccctgtggcggcagagtacctggggcaacattattgtcgtggtgttgattatgctgatgacggcggcactgaatttaggctcactcgccagcgttgccagcgccacctttttgatttgctacctggcggtgtttgtggtggcgatccgcctgcgtcatgatattcacgcctcgttgccgattcttatcgttggtacgttggtgatgttgttggtgatcgttggctttatctacagtctgtggtcccagggtagccgtgcgttgatatggattattggctcactcttactcagccttattgtggcaatggtcatgaagcgcaataaaaccgtataacatctctctgtgcgcagtacttcctgtattattgtggtggcggtcgatattcgcactggcaaaaaaacgtgcttgaatatctgttgaaaccctttaacaaagcacaggaggcgttgcgcgaacgatgaacatcagcgatgtagcaaaaattaccggcctgaccagcaaagccattcgcttctatgaagagaaggggctggtgacgccgccgatgcgcagcgaaaacggttatcgcacctacacgcagcagcatctcaacgaactgaccttactgcgccaggcacggcaggtgggctttaacctggaagagagcggcgagctggtgaatctgtttaacgacccgcagcggcacagcgccgacgtcaaacggcgcacgctggagaaggtggcggagatcgaacgacacattgaggagctgcaatccatgcgcgaccagctgctggcactggcgaatgcctgccctggcgatgacagcgccgactgcccgattatcgaaaatctctccggctgctgtcatcatcgggcagggtgattaagacgagacggctcggatatgtagggttatcccttctatcgcaatgacttcaacatgcgtacctgcaccgagatcctcgctggcgctgacaggccatgaactgtcaccgacgcgcatatgaccgcgcccgttgaccagcggagattccagcacaaaacgtcggccaatcagctgctgcccgcgctggtttaaatgactatcgctgtgcttttgttcgcgcacccgccgcgacaaccatttccaccacagccaggcggcgagcagcgtcaggatggcaaacattaccccttgccactcccaacccagcggcaccagccagaccaccaggccggtaatcaccgctgccacgccgctccacaacaaataaccatttccgcccagcatctcggctgccagcagcaaaccgccgagactgagccagaaaatatgtggatgaacgaccattaactccatcatggctgagtccgtttgttggcgctgtctttcaccagctcggcaatcccggcaatcgaccccatcaggctgctggcctctaatggcatcatcactactttgctgttactggaggaaccgatctgctgtaacgcttcggtgtatttctgcgctacgaagtagttcaccgcctgaatatcaccggaggcgatagcttcagacaccattttggtggcgcgggcttctgcttcggcggaacgttcacgcgcttcagcctgtaaaaacgccgactgacgttcgccttccgctttcaggatttgcgactgtttttcaccttcggctttgaggatttccgcctgacggatcccttccgcttcaagaatgtaagcgcgtttggtacgttccgctttcatctgcgcgttcattgaagagataagctctgccggtgggcgcacgtcgcgaatttcaatacgggtgactttaatcccccacgggttggtggcttcatcgacaatacgcagcaggcgtgagttgatgctgtcgcgctgagagagcatttcgtcaagttccattgaacccagcacggtacggatgttagtcatggtcaggttgatgatcgccagctccagattgctgacttcataagccgcgcgcggcgcgtcaatcacctgaataaagcacacggcgtcgatggtaacgttggcgttatctttcgagataacttcctgggaagggatatcgagcacttgctccatcatattgatcttgcgaccaatgcgatccataaacggcaccaccagactgagccccggctgtaacgttttggtatagcgaccaaagcgttctactgtccactgatagccctgcggtacgattttgacacccgcgccgacaatgaccagcgcgacaaaaatgagaatcgggataaagataagcatcggaaaaacctcctgttgtaccgtccataatcagcaaaattgctgcttgattaaacaaattatacctgattactgaaagagagttcccccttattcctgcgaaggataaactgtttttagtaaaaatcagaaaaagggaacagcgatgcaggaaaatagtcctttgcttcagctacaaaacgtaggatatctggcgggtgatgcgaagattcttaataacatcaatttttcgctgcgtgctggcgaatttaagttaattaccggtccttctggttgtggcaaaagtacgctgctaaaaatagttgcttcattgatcagcccaaccagcggaacgttactgtttgaaggtgaggatgtcagcacactaaagccagaaatctaccgccaacaagtctcttactgcgcccagacaccgacgctgtttggcgatacggtatacgataatctgatctttccctggcagatccgtaaccggcagcctgacccagccatttttctcgattttctcgaacgcttcgccttgccggacagcattttgacgaagaatatcgccgagctatctggtggtgaaaaacaacgcatctcattgattcgtaacctgcaatttatgccgaaggttttattgctggatgaaataaccagtgcgctggatgaaagtaataaacataacgtcaatgagatgatccatcgttatgtgcgcgagcaaaatattgccgtgctgtgggtgacacacgataaagacgaaattaatcatgcggataaagtgattacactgcaaccgcatgccggagaaatgcaggaagcacgctatgaactcgcataatattactaacgaatcattagcactggcattaatgctggtggtggtggcaatcttaattagccataaagaaaaactggcgctggagaaagatattctctggagcgtcgggcgagcgataattcagctgattattgtcggctatgtgctgaagtatattttcagcgtggatgatgccagcctgacattattgatggtgttatttatctgctttaatgcggcgtggaacgcgcaaaaacgcagtaaatatattgctaaagcttttatctcatcgtttattgccattacggtcggggcgggaattaccctggcggtgctgattctctcagggtcgattgaatttatcccgatgcaggtgatccctatcgccgggatgattgccggtaacgccatggtagcggtggggttgtgttacaacaatttagggcaacgggtcattagcgaacagcaacagattcaggagaaactgagtcttggtgcgacgccgaagcaggcttcagcgatattgattcgcgacagtattcgcgcggctttaattccgacggtcgattcagcaaaaacggttggcttagtgagtttaccaggaatgatgtccgggctgatatttgccgggattgatccggtgaaggcgattaaatatcagattatggtgacctttatgctgctctcaaccgccagcttgtcgaccattattgcctgctatttaacctatcgtaagttttataattcgcgccaccagttggtggtgacgcaattgaagaagaaatgatgcgatgccggatgcgcagcatcgcatccggcgttgtggttcatgtgccgatcaacggaatatcaatacaacaatgcatacagctggcggcgatacttcgacgccagtgcatcacccgtacccagcgcagcgaggatctcctggaacgttttacgcgtctgaccgtctgcggcggtgagatctttacgcagatgcccgaacagcaactccagcgcctcttcattgcgcccaacctgatgcagttgcagcgccagttgcgtcgccagtgcggcatcttctggattctccgccacctgctgttgcaactgttgaatttccggcgtatcagccgcctgcttcagcagttcgatttgcgccaccagcccctggtagcgggtgtcctgatcctgcaacggaatggttttcagcaccgcttccgcatcttcagaacggttcagcgcaatcagcgtttctgccagcagcaggccgatctccccgttctgattcgacaactgccaggcgtctttcagcaatggcagggcatcggtgtaattgctttcctgcatcagttgcatcgcctgctgcgctttcagctcttcttcgcgcggcagcactttatccagcagggcgcggatcgcctcttccggttgcggcccctggaagccatctaccggttgcccgttctggaacagatacacggtcggaatcgcacgcagaccaaactgcgcggcaatcatctgctccgcgtcgcagtccagcttcgccagaataaattgcccgttgtactgcgccgcgaggctttccagaattggggttaactgcaaacagtgctggctacgttcagaccaaaaatagaacagcaccggagtggtcatcgactgttcaagaacctgttgcaggttagattcgttaatgttgacaatattttctacggacatggagtcgctctctgttgtcgatattttctttgacatgggggcttaagcgcgcgcttcaactcacccctgcaatattttgtccatcacgcgccccggcagcaggcgcttaagcaccattaccgcccaggtcaccagcgtcaccggatagcgcatcttcggcttctcgctaataaaagcatggcgtactttgtccaccaccgcttccggtcccaacgtaaagcgggcggcgatgccgggattttcgactggtttatcactttgcgtctggttgacgttgtcggtgaagcgagtacgaatgggaccgggttcgatcaggctgactttaattccgctgtggcgcagctccatgcgcagtgcgtctgaccacgcctccagcgcatatttactggccgcgtaagcgccacgacccggcgtggagattaatcccatcaccgatgatgtcatcacaatacgcccttcaccgtgcggtaacatcgcgggtaacaggcgcatggtgagctggtgtgcgccgaaaaagttggcggaaaactgctgttccatctgcgcacggctgatggtggaaagggggccatacatgccgaatccggcattgttaaagatcccatacagacaattatcggtcagggcgatcacctcgtcggctgcgcgatcaacactttctggtgaatccagatcgatcaacacgccggtaaatcccatgctgttcatgcgctcaacatcatccggtttccggcaacctgccagcacatgaaaaccctggcgttttaattcgagcgcgctttccaggccaattccactggaacatccggtaattaagaccgatttttgcataactttacctgtcaggatctccgttgctttatgagtcatgatttactaaaggctgcaactgcttcgccatccagtcggcaataaacggctgggcgtcgcggttgggatgaataccgtcatcctgcatccattgtggcttgaggtagacctcttccataaaaaagggcagcagcggaacatcaaactctttggcgagtttggggtaaatggcgctaaaggcttcattataacggcgaccatagtttgcaggcagacgtatttgcattaacaatggttcagcgttggcggctttgacatcctgcaaaatctggcgcagcgtttgctcggtttgctgtggctgaaaaccacgcaaaccgtcattgccgcccagttcaaccagcacccaacgcggctgatgctgtttcagcagagccggaaggcgcgccagtccttgttgcgaggtgtcgccgctgatgctggcattaactaccgacgttttactctgccacttatcattcaacaaggcaggccaggccgcgctggcagacattcgatacccggcgctcaggctatcacccagaatcaataacgtgtccgctgcggcggcacggaaggttaacaggaccaggaacaggaagggcaaatgccagcggaaaacattgttgaagttcatcatcttaagaagtccgtcggtcagggggagcatgaactctccatcctcaccggagttgagctggttgtcaaacgtggcgagaccatcgcactggtgggcgagtcgggatcgggtaagtcaaccttgctggcgatcctcgccgggcttgatgacggcagcagtggcgaagtgagtctggtgggacaaccgctacataatatggacgaagaagcgcgggcaaagttgcgcgcgaagcacgtcggctttgtttttcagtcatttatgttaattcctacccttaacgcgctggaaaacgtcgagcttccggctctgctgcgcggtgagagtagcgcggaaagtcgtaacggggcgaaagcgttgctcgaacagttagggctgggtaaacgtctggatcatcttccggcacagctttccggcggtgaacagcaacgagtggcgctggcacgagcctttaatggtcgacctgatgtgctgtttgccgacgaacccaccggcaaccttgaccgccagacgggcgataaaattgccgacctgctgttttccctcaaccgtgaacatggcaccacgttgattatggtgacccacgacctgcaactggcggcacgctgcgaccgctgcttacggctggtgaacgggcagttgcaggaggaagcatgattgcacgttggttctggcgcgaatggcgttcgccgtcgctattaattgtctggctggcgctaagcctggcggtggcctgcgtgctggcgctgggcaatatcagcgatcgcatggagaagggcttaagccagcaaagccgtgagtttatggcgggcgatcgggcgttgcgcagttcacgcgaagtgccgcaagcgtggctggaggaagcgcaaaagcgcggcctgaaagtcggcaagcagctgactttcgccacaatgacctttgcaggcgacacaccgcagctggcgaacgtcaaagcggtggatgatatctacccgatgtatggcgatctgcaaactaatccccctggcctgaaaccgcaggcgggtagcgtattgctggccccacgcctgatggcactgcttaacctgaaaacgggcgacaccattgacgtgggcgatgccaccttgcggattgccggagaagtgattcaggaaccggattccggttttaaccccttccagatggctccgcgtctgatgatgaatctggcggatgtcgataaaaccggagccgtgcagccggggagtcgggtcacctggcgttataaattcggcggcaacgagaaccagctcgacggctatgagaaatggttgttacctcagcttaaacccgaacaacgctggtacggtctggaacaggacgaaggcgcgctggggcgatcgatggaacgctcgcaacagttcctgctgctttcggcgcttctgaccttgctgctggcagtggcagcggtggcggtagcgatgaatcattactgtcgcagtcgctacgatctggtggcgatcctcaaaacgctgggggcagggcgagcgcaactgcgtaagctaatcgtcggtcagtggttgatggtgctgacgctttcagccgttaccggtggggccataggcctgttgttcgaaaacgtgttgatggtgctgctcaagcccgttctgcctgctgcactaccgccagccagcctctggccgtggctgtgggcgcttggcaccatgacggtcatctcgctgctggtggggctacgaccatatcgcttgttgctggcaacgcagcctttacgcgtattacgtaatgatgtggtagcgaacgtctggccgctgaagttttatctgccgattgtcagtgtggtggttgtgctgctgctcgccggattaatgggtggcagcatgctgctttgggcggtgctggcgggcgcggtagtactggctttgctgtgcggtgtgctgggctggatgctgctgaatgtacttcgccgcatgacgctgaaatcgctgcctctgcgcctggcggttagccgcctgttacgtcagccgtggtcaacgttaagtcagctttcggcattttcgctctcctttatgctgctggcactgctgctggtgttgcgtggcgatctgctcgaccgctggcagcagcagctacctccagaaagcccgaactactttttaattaacatcgccacagaacaggtagcaccgctaaaagcgttcctcgcggaacatcagatagtcccggaatcgttttatccggtggtgcgggcgcggctgacggcgattaacgataagccgacagaaggtaatgaagatgaggcgcttaaccgcgaactcaatcttacctggcaaaatacgcggcccgatcataatccgattgtcgccggtaactggccgccaaaagccgatgaagtgtcgatggaagaggggctggcgaaacgcttaaacgttgccctcggtgataccgtgacttttatgggcgatacccaggagttccgcgctaaagtgaccagcctgcgcaaagtggactgggaaagtctgcggcctaatttctattttattttccctgaaggggcattagacgggcaaccgcagagctggcttaccagtttccgctgggagaatggcaacggcatgttgacacaactcaaccgccagttcccgaccattagcctgttagatattggcgcgattttaaaacaggtcggtcaggtgctggagcaggtaagtcgggcgctggaagtgatggtggtactggtcaccgcctgcggtatgttgctgttgctggcacaggtgcaggtgggaatgcgtcagcgtcatcaggagctggtggtgtggcgcacactcggtgcggggaaaaaactgctgcgtaccacgttgtggtgtgagttcgccatgcttgggtttgtttccggcctggtggccgcaattggtgcggaaacggcgctggcagtgttgcaggcgaaagtgtttgattttccgtgggagccagactggcgattgtggattgttctgccgtgcagcggagcgctgctgctgtcgcttttcggcggctggctgggtgcgcgactggttaagggtaaggcgctgttcaggcagtttgcggggtgatgagagtaaataaggggcgttctggttgaatggaacgccttgtttaaattaattctacaatatgtttcattgatgatgttattgaattggtgatttcctatctttctattgctgatattaatctgaatcggtggagtttattgattttaaatatagccctacaaaaataactcagactaataaaatcataaatcatatgcgttgaatggatattatccatatagtgaatttgttgatgatgaattcatctgtgctaaaaatgttagtttaataaaatattgaaagtgacctgtaataacagttgttgttgattgagaacaaataagtttatgtgaaaaatatataaatacattagctggtcttgtgtgtcattttatttttttttgttgctaacacagggatatgaacaataactaaaagggcactttatatgagcggaaaaccagcggcgcgtcagggagatatgactcagtatggcggtcccattgtccagggttcggcaggtgtaagaattggcgcgcccaccggcgtggcgtgctcggtgtgtccgggcgggatgacttcgggcaacccggtaaatccgctgctgggggcgaaggtgctgcccggcgagacggaccttgcgctgcccggcccgctgccgttcattctctcccgcacctacagcagctaccggaccaggacacccgcgccggtgggagtgtttggccccggctggaaagcgccttctgatatccgcttacagctacgcgatgatgcactggtactcaacgacaacggcgggcggagcattcactttgagccgctgctgccgggggaggcggtgtacagccgcagcgagtcaatgtggctggtgcgcggtggtaaggcagcgcagccggacggccacacgctggcgcggctgtggggggcgctgccgccggatatccggttaagcccgcatctttacctggcgaccaacagcgcacaggggccgtggtggatactggggtggtctgagcgggtgccgggtgctgaggacgtactgccagcgccgctgccgccgtaccgggtgcttaccgggctggcagaccgtttcgggcggacgctgacgtaccggcgtgaggccgcaggcgacctggccggggaaatcaccggcgtgacggacggtgccgggcgggagttccgtctggtgctgaccacgcaggcgcagcgtgcggaagaggcccgcacctcttcgctatcttcttctgacagttcccgccctctctcagcctcagcgttccccgacacactgcccggtaccgaatacggccccgacaggggtatccgcctttcggcggtgtggctgatgcacgacccggcatacccggagagcctgcccgctgcgccactggtgcagtacacgtatacggaagccggtgaactgctggcggtatatgaccgcagcaatacgcaggtgcgcgctttcacgtatgacgcgcagcacccgggccggatggtggcgcaccgttacgcgggaaggccggagatgcgctaccgctacgacgatacggggcgggtggtggagcaactgaacccggcagggttaagctaccgctatctttatgagcaggaccgcatcaccgtcacggacagcctgaaccggcgtgaggtgctgcatacagaaggcggggccgggctgaaacgggtggtgaaaaaagaactggcggacggcagcgtcacgcgcagcgggtatgacgcggcaggaaggctcacggcgcagacggacgcggcgggacggaggacagagtacggtctgaatgtggtgtccggcgatatcacggacatcaccacaccggacgggcgggagacgaaattttactataacgacgggaaccagctgacggcggtggtgtacccggacgggctggagagccgccgggaatatgatgaaccgggcaggctggtatcggagacatcgcgcagcggggagacagtacgctaccgctacgatgacgcgcacagtgagttaccggcgacgacaacggatgcgacgggcagcacccggcagatgacgtggagccgctacgggcagttgctggcgttcactgactgctcgggctaccagacccgctatgaatacgaccgcttcggccagatgacggcggttcaccgcgaggaaggtatcagcctttaccgccactatgacaaccgtggccggttaacctcggtgaaagacgcacagggccgtgaaacgcggtatgaatacaacgccgcaggcgacctgactgccgtcattaccccggacggcaaccggagcgagacacagtacgatgcgtggggaaaggcggtcagcaccacgcagggcgggctgacgcgcagtatggagtacgatgctgccggacgtgtcatcagtctgactaacgagaacggcagccacagcgacttcagctacgatgcgctggaccggctggtacagcagggcggctttgacgggcggacgcaacgttatcattatgacctgaccggaaaactcacgcagagtgaagatgaggggcttatcaccctctggcactacgatgcgtcggaccgcatcacgcaccggacggtgaacggcgacccggcagagcagtggcagtatgatgagcacgggtggttaaccaccctcagccataccagtgaaggccaccgcgtgtcggtccactacggctatgacgataaaggccgcctgaccggcgaacgccagacggtggagaacccggagacgggggaactgctgtggcaccatgagaccggacatgcgtacaacgaacaggggctggcaaaccgcgtcacgccggacagtctgccgccggtggagtggctgacctacggcagcggctatcttgcgggcatgaagctgggcgggacgccgctgctggagttcacgcgcgaccgcctgcaccgtgagacggtgcgcagcttcggcagcatggcaggcagtaatgccgcatataaactgaccagcacatacacccccgcaggccagttacagagccagcacctgaacagcctggtgtatgaccgtgactacgggtggaatgacaacggcgacctggtgcgcatcagcggcccgcgacagacgcgggaatacggctacagcgccacgggcaggctggagagtgtgcgcaccctcgcaccagacctggacatccgcatcccgtatgccacggacccggcgggcaaccggctgccggacccggagctgcacccggacagtacactcacagtgtggccggataaccgcatcgcggaggatgcgcactatgtctaccgccacgatgaatacggcaggctgacggagaagacggaccgcatcccggcgggtgtgatacggacggacgacgagcggacccaccactaccactacgacagccagcaccgcctggtgttctacacgcggatacagcatggcgagccactggtcgagagccgctacctctacgacccgctgggacggcgaatggcaaaacgggtctggcggcgggagcgtgacctgacggggtggatgtcgctgtcgcgtaaaccggaggtgacgtggtatggctgggacggagacaggctgacgacggtgcagactgacaccacacgtatccagacggtatacgagccgggaagcttcacgccgctcatccgggtcgagacagagaacggcgagcgggaaaaagcgcagcggcgcagcctggcagagacgctccagcaggaagggagtgagaacggccacggcgtggtgttcccggctgaactggtgcggctgctggacaggctggaggaagaaatccgggcagaccgcgtgagcagtgaaagccgggcgtggcttgcgcagtgcgggctgacggtggagcaactggccagacaggtggagccggaatacacaccggcgcgaaaagctcatctttatcactgcgaccaccggggactgccgctggcgcttatcagcgaagacggcaatacggcgtggagcgcggaatatgatgaatggggcaaccagcttaatgaggagaacccgcatcatgtgtatcagccgtaccgtctgccagggcagcagcatgatgaggaatcagggctgtactataaccgtcaccggtactacgatccgttgcaggggcggtatattactcaggacccgatggggttgaaagggggatggaatttatatcagtatcctttaaatccactacaacaaattgaccctatgggattattgcagacttgggatgatgccagatctggagcatgtacggggggagtttgtggtgttctttcacgtataataggaccaagtaaatttgatagtactgcagatgctgcgttagatgctttgaaagaaacgcagaatagatctctatgtaatgatatggaatactctggtattgtctgtaaagatactaatggaaaatattttgcatctaaggcagaaactgataatttaagaaaggagtcatatcctctgaaaagaaaatgtcccacaggtacagatagagttgctgcttatcatactcacggtgcagatagtcatggcgattatgttgatgaatttttttcaagtagcgataaaaatcttgtaagaagtaaagataataatcttgaagcattttatctcgcaacacctgatggacgatttgaggcgcttaataataaaggagaatatatttttatcagaaatagtgtcccgggattgagttcagtatgcataccgtatcatgattaattttagtgcttttattagtggggcctataaggagattcaatgaaatatagttcaatattttcgatgctttcattttttatactatttgcctgtaatgagacagctgtttacggttctgatgaaaacattatttttatgaggtatgtggaaaaattacatttagataaatactctgttaaaaatacggtaaaaactgaaacaatggcgatacaattagctgaaatatatgttaggtatcgctatggcgaacggattgcagaagaagaaaaaccatatttaattacggaactaccagatagttgggttgttgagggagcaaagttaccttatgaagttgcgggtggtgtatttattatagaaattaataagaaaaatggatgtgttttgaatttcctacatagtaaataatgctggcgctgatggatgcggatggaaacattgcgtggagcggggagtatgatgagtggggcaaccagctgaatgaagagaacccgcatcacctgcaccagccgtaccggctgccggggcagcagtatgataaggagtcggggctgtactacaaccggaaccggtactacgatccgttgcaggggcggtatatcactcaggacccgatagggctggaggggggatggagtctgtatgcgtatccgctgaatccggtgaatggtattgatccattagggttaagtcccgcagatgtagcgctaataagaagaaaagatcaactaaaccatcaaagagcatgggatatattatctgatacttatgaagatatgaagagattaaatttaggtgggactgatcaatttttccattgtatggcattttgtcgagtgtctaaattaaatgacgctggtgttagccgatcggcgaaagggctgggttatgaaaaagagattagagattacgggttaaatctgttcggtatgtacggcagaaaagtaaagctatcccattctgaaatgattgaagataataaaaaagacttggctgtaaatgaccatgggttgacatgtccatcaacaacagattgctcagatagatgtagtgattatattaatccagagcataaaaaaacgataaaggctttacaagatgctggctatctcaagtaatctatcaaagatgataatatttatttttgctattataatcattgttgttttatgcgtaattacttatctttatttatacaaagatgaatctcttgtaagtaaacattacataaactatatggcaataccagaaaatgatggagtttttacatggctcccagatttttttccgcacgtagcggtggatatatcaatatacacaaatgtagaagatgattatttttttcttatttttccctaacaaatgatgatgggggtaggtttaagaaaacattgacagtgagggccagggaacaagtggcgaaaatcgtatcaaagaatgatccagatacaaaaaaagtgtggtgtaaatatggtaagataccagggcaaggggatggtgtaaaccttttttttgttggtgaaattaatgttacgcattattttataacaaatattggagctggattgcctgatgcttgtgcagagtaattgcttgaattaagagtctatcccatatcgaagtcgtcaacttcgtagtgaggaaaagtaaaattcctgactgagaaaagacatgtcggctattgtgtaaagccatatagctcagacgatgaatatctactcgtattcagttgtttattgagggtgagttccgaccctgaaacaacaaataaaatgaacagtcagagagtttacatagaattgcactggtcttttacgatatctgacattgtgtaatacatattcagccatgcattaattaaaatgttacgtgtttaatgtgagtccctatctgaaaataaataatccttccggattaaaataaattcttgccgggaaagaaagaggaaataaaccattagcggaaaaccagcggcacgccagggtgacatgccccagtacggcggcccgatagtccagggttcagcgggggtactgatagtcgcgccgactgcatcgagaactccatacaactttttacggaacgtcacctgataaaatttgttcagtatcgtcttttgagattctcaaggttatggagtaaccagacagaacggacaccactgtcggagataaaaaccccctgtttacgcagctcgttgctggcccggtgctgaccatgtgtcgggaaagcgacggcgtaatcaacaacagcctgttcagttgcctcatcggtacggttcttaaggttaggagcgcggcgactacgattaatctgcgcatccacaccgccttcagcgaccagttcgcggtaacgataaaacgtatcacgcgaaacgcccatgattttacaggcttttgatacgttgctgagttcttcagccagattgagcaaaccggctttgtgtttgatgacgggattggcagtatgaagcatgagagttacctcttgttttggataaggattcgacactcatatcaaaaccggtaactctcaacctttcaaggccatgtgtcagatcaagtcgcgactaatacaaatacgtccctcattaccgcgccttaacccattccgccacttccgcccactcaccgcgaaagacaactttttccgcttttttctcaagctgatagcgatacatcgggtcgtaatattcttcaagtaacggcaccagccaggccagatgaccgtcggtgctgccggtggtgagttgcgttgtcagtgctgcatccagccttgcagccagttcgttatagcgctgtagccccagccgacgcttaatcgccgaaagtccgtgatgcaggtattcgcaatactcctgccagccctgttcgtcgccgtacgcgtgggtaaaatcatgatgcatacgcaagaaatactcttcgttcaggcgctcaagacggatctcaaacggatcttctaccaccgcaatcgccgcctgagtcattcgctcgcgcaggcattccggcaggtgattcgaaccgatcatccggctttcgtcttccagcacccacaggcgcaaattctgacgggcgtcggtttttagcatttcggcagccagcaggttttcaaaactcgcctggctaagttgtggttgtaacgtgcgaccaaacgccgaaccgcgatgacgcgccaacccttccagatcaacaccgttcggctgttgctgcactaacagcgttttaccgctgccggtacaaccgccaatcagcactatcggtttttgtgccagttcaatagtcgcctgaatcgcggtctggcgcagtgccttataaccgccttccaccagcggataatcaatccccgctgcatgcaaccagctttgcacaatatgtgagcgctgaccgccacgggcgcagcagagaataccttgcggattttgcaggcacgctgcccgccaggcgtccatgcgctgctgacgaatttcacccgccaccagtttatgtcccagcgccagcgctgcgtctgagccttgctgtttatagcaggtgccaacggcggcgcgttcatcgttattcattaacggcagattgatagcggcgggcattgcgccgtgctcaaactcgataggggcgcgaacatcaataatgggcgtatcagcaatcagcagggcacgatagtcctgttccgtgtgtctctcttgcatagttaaaagtgaacctcaaatcagcttgcgcgctattttacgcgccaacgcgcaaggaaacttgatttttaactgcgtgggttgccgaaaatttctaaaaatccgctgatttccggcctgcgctgggtaaacaaggtcacaatatcttctaccgctttgccgctgccaaatttgcgccatgccagactcaatggcgaaggagggcgcatcgttgggattacccggctgaccagttgttgattatcgatcattgactggcaaagcgattttggcaaaaaaccaatgccaacgcccgccagatgggcggcgattttcgtttccatatcgggaacaataatctctttttgccctggcaatcgccaggcgacgcgtttggttaaggtgcgggcgctgtcttcaatattgaccgccggaaagcgccgcaactgcgcttctgttagcggctcttcaacgttcgccagcggatgatccgccgccatgacaaagcgccattgcaccgatcctaagggatcaagactaaaggtatttgccagcgcctcagttcccgtgacgccgatagccagcgaaaaaccttcgtacaatagcgagtcccagacgcccatatagatttgtcgggagatgtgaaactgggtaaaggggtaacgctcattcagccacgccagcaactgggcgacggcctgggggttgtagagcaggttgttgatgacaatattcacctggcgttccacgccatcattcacctgttgcagctcgcttggcatactttccaaccagctcagccagtctctggcctgggaaagtagatgctcgccagccgctgtcaacgtcacgctgcgagtcgtacggaaaaacagcgctactccggtattctcttccagaagtttaatgcgataactgatcgtcgccgtggttttacataatcgttctgccgcttttgaaaaacttcctgtttcagcaaccgcaatgaaagtccgcaaggtttctggatcgaacatcttcaggtatccccttttaaatccgcaagttgcgtgattttcttatcctctgatttatcagtatttttacatgataaccctgttcaatttgtggactaaatctagttttggaaaaatattccaacttttgtattgatgttgttctcttaaggttttagattgcctgttattgaaaccaagctgaccggtcggcggtggttgaacggaattatgttacaaggacaaaaagatgaaacttcaggtattaccgttaagtcaggaagcctttagtgcttatggcgacgtaatcgaaacgcagcaacgggattttttccatattaacaatggcctggtggagcgttaccacgatttggcgctggttgagattcttgagcaagaccgtacgcttatcagcattaaccgcgcgcaaccggcgaatctgccgctgaccattcacgaactcgaacgtcatccgctgggtactcaggcctttatcccgatgaaaggtgaggtgtttgtggtggtcgtggcgttaggtgacgacaaaccagacctgtcaacgctgcgggcgtttatcaccaacggcgaacagggagtgaattaccatcgtaacgtctggcatcacccacttttcgcctggcagcgcgtcaccgattttctgaccatcgatcgcggcggcagtgacaactgtgatgttgaaagtattcctgaacaggaactctgttttgcgtgacgcctgcaaccgacttgcataagataaactaattgttcattgtttatgctcacttgtaggtcggagttaacgtaggtatgacggaagttagacggcgcggcaggccaggacaggcggagcctgtggcacagaagggcgcacaggcgttagagcggggaattgcgattctgcaatatttggaaaaaagtgggggaagttcgtcggttagcgatatttctctcaatctggatttgccgctctccacgacctttcgcttgctgaaggttttacaggcagcggattttgtctatcaggacagtcaattaggctggtggcatataggattaggtgtctttaacgtcggtgcggcgtacatccataaccgcgatgtcctctccgtcgccgggccgtttatgcgccgcctgatgttactttccggcgaaacggtcaatgtcgcgatccgtaacggcaatgaagcggtattaattggtcagttagagtgtaaatcgatggtcaggatgtgtgcgccactgggcagtcgtctgccactgcatgcttccggtgcgggcaaagcgctgctttatccgctggcggaagaggagttgatgagcatcattctgcaaaccggtttgcagcagtttacgccaactacgcttgtggatatgcccaccttgctgaaggacctggaacaagcgcgtgaactgggctataccgtagataaagaagagcatgttgtaggtctgaattgcatagcttcagcaatttacgatgatgtcggtagtgttgttgccgctatctccatctccgggccttcatcaagactgacagaagatcgttttgtcagtcagggtgagctggtcagagacaccgcccgcgatatcagcacggcgttgggactgaaagcacatccataatgtctgtcgcatcccgctctgcggagcgggtttttttgacaaaatttgaaagttggaaaaattttccaataaatggaggtaggaataaaatggcaaaaatgagagccgttgacgcggcaatgtatgtgctggagaaagaaggtatcactaccgccttcggtgttccgggagctgcaatcaatccgttctactcagcgatgcgtaagcacggcggtattcgtcacattctggcgcgtcatgtggaaggtgcttcgcacatggcggaaggttatacccgcgcaacggcagggaatatcggcgtatgtctggggacttccggtcctgcgggcacggacatgatcaccgcgctctattccgcttctgctgattccattcctattctgtgcattaccggccaggcaccgcgcgcccgtctgcataaagaagattttcaggccgtagatattgaagcaattgctaaaccggtcagcaaaatggcggttacagttcgtgaagcggcgctggtgcctcgcgtgctgcaacaggcatttcacctgatgcgttctggtcgtccgggtccggtactggtggatttaccgttcgacgttcaggttgcggaaatcgagtttgatcctgacatgtacgaaccgctgccggtctacaaacctgctgccagccgtatgcagatcgaaaaagctgtagaaatgttaatccaggccgaacgtccggtgattgttgccgggggcggggtaattaatgctgacgcagctgcactgttacaacagtttgctgaactgaccagcgttccggtgatcccaacgctaatgggctggggctgtatcccggacgatcatgaactgatggccgggatggtgggtctgcaaaccgcgcatcgttacggtaacgcaacgctgctggcgtctgacatggtgtttggtatcggtaaccgttttgctaaccgtcataccggctcggtagagaaatacaccgaagggcgcaaaatcgttcatattgatattgagccgacgcaaattggtcgcgtgctgtgtccggatctcggtattgtctctgatgctaaagcggcgctgacactgctggttgaagtggcgcaggagatgcaaaaagcgggtcgtctgccgtgtcgtaaagaatgggtcgccgactgccagcagcgtaaacgcactttgctgcgcaaaacccacttcgacaacgtgccggtgaaaccgcagcgcgtgtatgaagagatgaacaaagcctttggtcgcgatgtttgttatgtcaccaccattggtctgtcacaaatcgctgcggcacaaatgctgcatgtctttaaagaccgccactggatcaactgtggtcaggctggtccgttaggctggacgattccggctgcgctaggggtttgtgccgctgatccgaaacgcaatgtggtggcgatttctggcgactttgacttccagttcctgattgaagagttagctgttggcgcgcagttcaacattccgtacatccatgtgctggtcaacaacgcttatctggggctgattcgtcagtcacaacgcgcttttgacatggactactgcgtgcaactcgctttcgagaatatcaactccagtgaagtgaatggctacggtgttgaccacgtaaaagtagcggaaggtttaggttgtaaagctattcgggtcttcaaaccggaagatattgcgccagcctttgaacaggcgaaagccttaatggcgcaatatcgggtaccggtagtcgtggaagttattctcgagcgtgtgaccaatatttcgatgggcagcgaactggataacgtcatggaatttgaagatatcgccgataacgcagcggacgcaccgactgaaacctgcttcatgcactatgaataagggagataaataatgttacgtttctctgctaatttatcgatgttatttggagaatatgattttctcgcccgttttgagaaagctgcgcagtgtggttttcgcggcgttgaatttatgtttccttatgactacgacattgaagaattaaaacatgtgctggcgagtaataaactcgaacatacgctgcacaatttaccggcgggtgactgggcggcgggggagcgcggtattgcctgtattcctggccgtgaagaagagtttcgggatggcgtagcagcagcgattcgttatgcccgtgcgctgggtaataaaaaaattaactgtctggtcggtaaaacgccggctggtttcagcagtgaacagattcacgcaacgcttgtagaaaacctgcgttatgccgcgaatatgctgatgaaagaagatattttattactgattgaacctattaaccattttgatattcctggtttccatctcaccggaactcggcaggcgctgaaattgattgatgatgttggttgctgcaatttgaaaattcagtatgacatttatcatatgcagcggatggaaggtgaattaaccaacaccatgactcagtgggctgataaaattggtcacctgcaaattgccgataatccgcatcgcggcgaaccgggaaccggagaaattaattatgattatctctttaaggtaatcgaaaattctgactacaacggttgggttgggtgtgaatataaaccccaaaccaccacggaagccggtttacgctggatggatccgtaccgttaaaacgtaacgctattcagacaatgcttttttaggccgctaagttggcaggggatcgtgttgtctgaattcaggaaaagcgaaatttaaaagaggttaattatgaaactgggatttattggcttaggcattatgggtacaccgatggccattaatctggcgcgtgccggtcatcaattacatgtcacgaccattggaccggttgctgatgaattactgtcactgggtgccgtcagtgttgaaactgctcgccaggtaacggaagcatcggacatcatttttattatggtgccggacacacctcaggttgaagaagttctgttcggtgaaaatggttgtaccaaagcctcgctgaagggcaaaaccattgttgatatgagctccatttccccgattgaaactaagcgtttcgctcgtcaggtgaatgaactgggcggcgattatctcgatgcgccagtctccggcggtgaaatcggtgcgcgtgaagggacgttgtcgattatggttggcggtgatgaagcggtatttgaacgtgttaaaccgctgtttgaactgctcggtaaaaatatcaccctcgtgggcggtaacggcgatggtcaaacctgcaaagtggcaaatcagattatcgtggcgctcaatattgaagcggtttctgaagccctgctatttgcttcaaaagccggtgcggacccggtacgtgtgcgccaggcgctgatgggcggctttgcttcctcacgtattctggaagttcatggcgagcgtatgattaaacgcacctttaatccgggcttcaaaatcgctctgcaccagaaagatctcaacctggcactgcaaagtgcgaaagcacttgcgctgaacctgccaaacactgcgacctgccaggagttatttaatacctgtgcggcaaacggtggcagccagttggatcactctgcgttagtgcaggcgctggaattaatggctaaccataaactggcctgatacccgcaataaaaatggccgatatcagaaaatgaatcggccagcaatattaaaaaagaaagcagccaaagatgttgcttcagtattaaaaataatatttttattttatttgttcctcatagctagattaaaacaacgttattcgatacgtgaaattaagagggatttatggaacatcagagaaaactattccagcaacgcggctatagcgaagatctattgccgaaaacgcaaagccagcggacctggaaaacatttaactattttaccttatggatgggttcggttcataacgttcccaattatgtgatggtcggcggcttttttattctcggcttgtctacctttagtattatgctggcaattatcctcagcgcctttttcattgccgcggtaatggtattaaacggtgctgcgggcagtaaatacggtgtgccttttgccatgatcctgcgtgcttcttacggtgtacgtggtgcactgtttcccggattattaaggggcggaattgccgccatcatgtggtttggtttgcaatgttacgcggggtcactggcctgcttgattctgattggcaaaatctggccgggatttttaactctcggtggtgatttcactctgttaggcctttctctaccgggcttaattactttcttaatcttctggctggtcaacgttggtataggttttggcggtggcaaagttttaaataaattcactgccattcttaacccgtgcatctatattatatcgttttcggcggtatggcgatttgggcgatttcactggtcgggatcggtccaatctttgactacattccgagcggtattcagaaagcagaaaacggtggcttcctgttcctggtggtgattaacgcggtagttgcggtctgggcggcaccggcggtgagcgcatccgactttacgcaaaacgcccactcgtttcgtgagcaggcgctggggcaaacgctgggtttagttgtggcctatattctgtttgcggtcgccggggtatgtattattgccggagccagtattcactacggcgctgatacctggaacgtgctggatattgttcagcgttgggacagcctgttcgcctcgttctttgcggtactggttattctgatgacaactatctccactaacgcgaccggtaatattattccagccggttatcagattgccgccattgcaccgacaaaactgacctataaaaacggcgtactgattgccagtattatcagcttgctgatctgcccgtggaaattaatggaaaatcaggacagcatttatcttttcctcgatattatcggcggaatgcttggtccggtaattggtgtcatgatggcgcattattttgtggtgatgcgcggacaaattaatcttgatgaactgtataccgcacctggcgattataaatattacgataacggttttaacctcactgcgttttcagtaactctggtggccgttattttatctcttggcggtaagtttattcactttatggaaccgttatcgcgtgtttcatggtttgtcggcgtcatcgtcgcctttgcggcctacgccttattaaagaaacgtacaacagcagaaaaaacaggagagcaaaaaaccataggttaattaatcccgatattgaacattgagttaaaaaccaatctgtattttacaaggagtttgttatgtcttttgatttaatcattaaaaacggcaccgttattttagaaaacgaagctcgcgttgtagatatcgccgttaaaggcggaaaaattgctgctatcggtcaggatctgggcgatgcaaaagaagttatggatgcgtctggtctggtggtttcgccgggcatggttgatgcgcacacccatatttctgaaccgggtcgtagccactgggaaggttatgaaaccggtactcgcgcagcggcaaaaggtggtatcaccaccatgatcgaaatgccgctcaaccagctgcctgcaacggttgaccgcgcttcaattgaactgaagttcgatgccgctaaaggcaagctgactattgatgcggcacaactcggtggcctggtgtcttacaacatcgaccgtctgcatgagctggatgaagtgggcgttgtcggcttcaaatgcttcgttgcgacctgtggcgatcgcggtatcgacaacgacttccgtgatgtaaacgactggcagttcttcaaaggtgcgcagaagctgggcgaactgggtcagccggtgctggtgcactgcgaaaacgcgctgatttgtgacgaactgggcgaagaagcgaagcgtgaaggtcgcgtaaccgctcatgactatgtggcttcgcgtccggtatttaccgaagtggaagcaattcgccgcgtactgtatctggcgaaagttgctggttgccgtctgcacgtttgccacgtcagcagcccggaaggtgttgaggaagtgactcgtgcacgtcaggaaggtcaggacgttacttgtgaatcctgcccgcattactttgtactggataccgatcagttcgaagaaatcggtactctggcgaagtgttcaccgccgatccgcgatctggaaaaccagaaaggcatgtgggaaaaactgtttaacggtgaaatcgactgcctggtttccgaccactctccatgcccgccggaaatgaaagccggtaacatcatgaaagcatggggcggtatcgccggtctgcaaagctgcatggacgtgatgttcgatgaagcggtacagaaacgcggtatgtctctgccaatgttcggcaaattaatggcgactaacgcagcagatattttcggtctgcagcaaaaaggccgtatcgccccaggaaaagatgccgacttcgtcttcattcagccgaatagcagctatgttcttaccaatgacgatctggaatatcgccacaaagtcagcccgtatgttggccgtaccattggcgcgcgtatcacgaaaaccatcttacgtggtgatgtgatttacgacattgaacagggcttccctgttgcgccgaaaggtcaatttatccttaaacatcagcagtaatctggcccctgcaatgcccgtccttgcggcgggcattctccggttaaggtgtgtttatgttcaattttgcagtcagccgcgaaagcctgttatcaggatttcagtggtttttctttattttttgcaacacggttgtggttcctcctacgctactttctgcttttcagttgccgcaaagtagcctgcttacgctcacgcaatatgcttttcttgctaccgcactggcctgcttcgctcaggcgttttgcggtcatcgtcgcgctattatggaagggccaggtggcctgtggtggggaaccatccttactatcacccttggtgaagcatcgcgcgggacaccgatcaacgatatcgccaccagcctggcagtggggattgcactctccggcgtgctgacgatgttgattggttttagcggattaggccatcgcctggcacggttatttacgccgtcggtgatggtcttgtttatgttgatgctgggcgcgcagctgaccactatctttttcaaaggtatgctcgggctgccgtttggcatagccgacccgaattttaaaattcagttaccgccgttcgcgctctcggtggcggtgatgtgcctggtactggcgatgattatcttcctgccgcaacgttttgcccgttatggcctgctggtcggcaccataaccggctggttgttgtggtacttttgctttccttcttcgcactcgctctccggtgagttgcactggcagtggttcccgctcggcagtggcggtgctttgtcgccgggaattattctgacggcggtgattacaggtctggtaaatatcagcaatacctacggtgcgattcggggcacggatgttttttatccgcagcagggcgcagggaatacgcgttatcgtcgtagctttgtggcgaccggatttatgacgctgataaccgtaccgctggcggtaattccattttcaccgtttgtttcatccattggtttattaacccagactggcgattacacgcggcgttcgtttatttatggcagcgttatttgcctgctggtggcgctggttcctgcactcacgcgactgttttgcagtatccctttacccgtgagtagtgcggtcatgctggtttcttatctgcctttactcttttccgcgctggtgtttagccagcaaataacgtttaccgctcgcaatatttatcgactcgcattgccgttatttgtcggcatatttttaatggcattaccgcctgtgtatctgcaagaccttccattaacgcttcgtcctctgctcagtaacggcttattggtcgggattttactggctgttcttatggataaccttattccgtgggaacgcatcgaataatttgttgaaaaaggattgataatgaagattgtcattgcgccagactcttttaaagagagcttaagtgcagaaaaatgttgtcaggcaattaaagccgggttttcgaccctctttcccgatgcgaactatatctgtttgccgatagcggatggcggcgaagggacggtggatgcgatggtcgccgcgacgggcggcaacatcgtgacgcttgaagtctgcgggccgatgggcgaaaaagtgaatgctttttatggccttaccggcgacgggaaaacggcggtgattgagatggcggcagcaagtggcctgatgctggtcgcgcctgaaaagcgtaatccgttgctggcctccagttttggtacgggggagttaattcgtcatgcgctggataacgacattcgccatattattctcggcattggcggcagtgcgacggtcgacggcggtatgggcatggcgcaggcgctcggtgtgcgtttccttgatgccgacggtcaggcgctggcggcaaacggtggtaatttagcgcgcgtggcaagcattgagatggatgaatgcgatccgcgtctggcgaattgccatattgaagtagcatgtgacgttgataacccgctggtaggggcacgcggcgcggcggcggtgtttggcccgcaaaaaggggcaacgccggagatggtcgaagaacttgaacaggggctgcaaaattacgcccgtgttttacaacagcaaactgaaattaatgtctgccagatggcgggcggcggcgctgcgggcggtatgggtattgcggcggcggtatttctcaatgcggatattaaaccgggcattgaaattgtgttgaatgcggtcaatcttgcgcaggcagtgcagggcgcagcactggtgattaccggggaagggcgcatcgactcgcaaacggcaggcggtaaagcgccgctgggtgtggcgtcggtggcgaagcagtttaatgtaccggtgattgggattgctggcgtattgggtgatggcgtggaagtggtgcaccagtacggcattgacgcggtattcagcattttgcctcgtctggcacctttagccgaagtgctcgccagcggtgaaatcaatctcttcaacagcgcgcgaaatattgcctgcgccattaaaataggtcagggaattaaaaactaacccttacctttaaagcggatgcgatttatatcgcataagagtgcagtactcatgccggatgcggcatgagtaccatatccttcctgaaaatcgcgcaaattctatatattgcagagatcatgtaggcctgataagcgaagcgcatcaggcaatgttacaaaaaaagccacggtataaaccgtggcaaaatccaacatagctaaaaataatcaggcgagtggtatgacttaaatctctacgtcgcggttacaatctttcgagtaaatatagctgaacgcttcaccacgccctacaccataaccagcctgtaaagaataagcgcccataaagatgtaatcgccttttttcaccgggatccagttattgtcgaggttataaaccccctgaccggaaagaatataggcaccgtgttcctgaacgtgtgtttcgatataaccgtggctggcacctggtgcaaaagagaggatatgcatgttcatatcaaaacctaactctttgggcagaaaatccagcagaataacatcgtccatgccttcataatgaatgcgttccagttcgctggcattgccagaaaccagccacggtgcatagccttctaccggaacatagcggcgcttatataaaaagatttggctgtcttcggcctgggcgttaacaaacgtcattaaggagcctggcgggcaataaagatagccaccttcgcttaaggcaaatgttttgccttcggctttggcagtgatatttccagagatcacatacaggaacgtttcaatgccttcgccaccgaagccctgttggttgccaccgttttgatgcagtgtgaccagataatcaacaaaagaggcacccagctttggcgtggagaggattgtcgcgtcacaattttcaaagcccggaataatattttttaccagaccatccggggttaacagtgcgaaattaccgtgtttaacaatcgcacggttagccagtaaatcttcgcggtaaccggtgacgttatttaaatatcccatttatgactccttatttctgccaggcaagttgataaagcatgagtgccaacgttttgaccccttcggcaaggtcggtaatattggtgcgttccgccgggttatggctgatcccgttgatgctggggataaaaatcatgcaggttggtacgcgaggcgcgaaaatttgcgcgtcgtgcccggcaccactgtgcatcacccggtaattcagtttttctctttcacacaattctgtcagggtggcgaccagctccttattcatcggcacgggttcttcgtccatccataaatcgatatcaataccaatgtccatttcatcgcaaatcgcccgcatgtcgttttctaactgttgggtgaaatcgcgcagcacggcagcgtcggtatgacgacaatcaatggtgaacgtggttttacccggcaccacatttaccgtattcgggcgcggctctactttgccaaaggtcagaaccagcggatcgcccatccttttcgctttttcgaccgactgatggcaaatgcgactgaaagcgtaaactgtatcacgacgataacccatcggcgtggtgcctgcatggtttgattcgccgttcagcgttaccgtataacgacgctgcccgacaattgcattcaccacgccaattgattgcccattactttccagcacacagccctgttcaatatgcagttcaacaaaggctttaatatcctgacgcggagttagtggggcgttcggaagagtaaatccgcaagccttcatcgcatcgacaaaactatttcctttggcatcacagatattccgcacgtcgtcaggattcgccagcccaaaaatatttttactgccccagaagacatacgggaagcggctgccttcttcttctgccatcgccaccacttcgaccgtacgtagcggcgcgccgtattgcgttttcagccagtcaattgccagccacgccgccagcgcgccgaattgcccgtcaaggttaccgccgttaaccacggtatcgatatgcgggtaatgactccaacttactgatagtgttttatgttcagataatgcccgatgaccaaagcccgtactttcgtacgagctcttctttaaatatggcggtgagggggggattgactcgcttcgctcgccctgcgggcagcccgctcactgcgttcacggtctgtccaactggctgtcgccagttgtcgacccccggtcggggcttctcatccccccggtgtgtgcaatacacgaaaaaaaagcccgtactttcgtacgagctcttctttaaatatggcggtgagggggggattcgaaccccggtcggggcttctcatccccccggtgtgtgcaatatacgaaaaaaaagcccgtactttcgtacgagctcttctttaaatatggcggtgagggggggattcgaacccccgatacgttgccgtatacacactttccaggcgtgctccttcagccactcggacacctcaccaaattgtcgttcctgtcttgctggaacgggcgctaatttagggaaatcatgacctgaggtcaacaaactttttgaaaaaatcgcgcgtttattcaaacttcaatcaatgtgtggttttaataagcgaaatctgctttttttgccaccgacaacggatttgttatgctggtggcctttgtagatcataacgataagtgcgaataaatttcgcacaacgcttttcgggagtcagtatggatatcatcttttatcacccaacgttcgatacccaatggtggattgaggcactgcgcaaagctattcctcaggcaagagtcagagcatggaaaagcggagataatgactctgctgattatgctttagtctggcatcctcctgttgaaatgctggcagggcgcgatcttaaagcggtgttcgcactcggggccggtgttgattctattttgagcaagctacaggcacaccctgaaatgctgaacccttctgttccactttttcgcctggaagataccggtatgggcgagcaaatgcaggaatatgctgtcagtcaggtgctgcattggtttcgacgttttgacgattatcgcatccagcaaaatagttcgcattggcaaccgctgcctgaatatcatcgggaagattttaccatcggcattttgggcgcaggcgtactgggcagtaaagttgctcagagtctgcaaacctggcgctttccgctgcgttgctggagtcgaacccgtaaatcgtggcctggcgtgcaaagctttgccggacgggaagaactgtctgcatttctgagccaatgtcgggtattgattaatttgttaccgaatacccctgaaaccgtcggcattattaatcaacaattactcgaaaaattaccggatggcgcgtatctcctcaacctggcgcgtggtgttcatgttgtggaagatgacctgctcgcggcgctggatagcggcaaagttaaaggcgcaatgttggatgtttttaatcgtgaacccttaccgcctgaaagtccgctctggcaacatccacgcgtgacgataacaccacatgtcgccgcgattacccgtcccgctgaagctgtggagtacatttctcgcaccattgcccagctcgaaaaaggggagagggtctgcgggcaagtcgaccgcgcacgcggctactaataaagcatcaggattcctgctatccttggcgggaattgaatacaggagagagttatgtatcccgtcgaccttcatatgcataccgttgccagcacacatgcatatagcacattaagtgattacattgcccaggccaaacaaaagggcattaaactttttgcgatcaccgatcatggcccggatatggaagatgcgccgcatcactggcacttcattaacatgcgtatctggccgcgagtggttgatggggtagggatcctgcgcggcatcgaagctaacattaaaaatgttgatggtgaaattgactgcagcggtaaaatgtttgactcgctggatctaattattgccggttttcatgagccggtttttgcgccacatgacaaagcgaccaatacacaagcgatgatcgccactatcgccagcggcaatgtgcatataataagccatcccggaaatcccaaatatgaaatagatgtgaaagccgttgctgaagcagccgcgaaacatcaggtggcgctggaaatcaataattcctcatttttacactcacgtaagggcagtgaagacaactgtcgtgaggtagccgcagcggtacgtgatgctggaggttgggtggcattaggctcggattctcacaccgcgtttaccatgggggaatttgaagagtgtcttaaaatcctcgacgcggtagattttccgccagagcgcattttgaatgtttctccgcgccgcttactgaacttccttgaatctcgcggtatggcaccgattgcggaatttgcagacctttaattactagtaatggaaatatattaatgaacgagttttctatcctctgtcgtgtgctgggttcgctctattaccgccaaccacaagatcctttactggtgccgctgtttaccctgattcgtgaggggaaactggctgcgaactggccactggagcaggatgagttgctgacacgtttgcagaaaagctgtgatatgacgcaagtctctgccgattacaatgcgttgtttatcggcgatgaatgtgctgtgccgccatatcgtagcgcatgggttgagggcgcgacggaagcggaagtgcgcgcttttctttctgagcgagggatgccattagcggatacgccagccgatcacatcggcacattgctgctcgcagcttcctggctggaagatcagtcaacggaagatgagagcgaagcactggaaacactgttcagtgagtatctgttaccctggtgtggtgcgttccttggcaaagtggaggcccatgcaaccacgcctttctggcgcaccatggcaccgctaacccgcgatgccattagtgcaatgtgggacgagctggaagaagattctgaagaataagtgtgatctacgtcactcataactgcaacggataatttgttgttgcataaaatgtgtgctcgatctcattcatggccgcgttttctgctatcatgcgcggcatgaacatacttctctctattgcaatcacaacaggcattctctccggtatctggggatgggtggctgtttccctgggcttactaagctgggcgggcttcctgggctgtacggcctactttgcctgcccgcaaggtgggctgaaagggctggcgatctccgctgcaaccctgcttagtggcgtggtgtgggcgatggtcattatttacggtagtgcactggcaccacatctggaaattctcggttatgtcataaccggtattgtcgcgtttctgatgtgtattcaggccaaacagctgctgctttcatttgttccggggacgtttataggcgcatgcgcgacgtttgccgggcagggtgactggaaactggtgttaccttcgctggcgcttgggctgatatttggttacgcaatgaaaaacagtggcctgtggctggcggcgcgtagtgcaaagacggcgcaccgtgagcaggaaatcaaaaataaagcgtgaggggcactcacgctttcgcttaaacagtaaaatgccggatgataattccggcttttttatctgtcaggattccggtggaaccgacatatggcggtatttcaccagaatgtcattctgccgttctgctttattttgcaaatcccacagaccacggtcgataccatcattaatcaggaaaatgacccctgtttcgatagccgacatcaggcacagcataacaggttcgttcgaggtgtaacccacttccccttcaagcaagcgctggtagtcaataaagcggaaaaccccggcctgaacttcataggaaagtatcgtcttactggtgttcaccgaagaaaggatctcgccggtactcacattgacgacgcgcaggttcacggcaatctgatcgagctggtattgcgtgtcggcaccgatgccaaaatatcttgccccaaccccgccagatttgacgttgctttcataaccgataatcgaaccttcaaccatgatatttgccgccgttaaagattgcagcgggattcggttattaatggcaaccgtgccgttttcttgtgccgcacgaataatcttgcgctcgttaagcaggttttgtaagccctggcgctccagcggtataaaccagcgagaatctttcagtgccgtgaccagcattgccgtggcgctttgcggaacagcagtggagaagttacttgccgggtagggtttaaattgcccggtttcgtcctgaatgttgtataccgaaacaaagattttacccgtcggcgctggcagatgggtcaaatctttgtagctctgagcacgaggcattaatgtcggtctggcggcttctttaggcggggcggttaagcatccgctcagtaacatgacggcaaccaaaagaaataagcgctgcatgattattttccttatgaagctggggcttaaaaatcggttgagttattttgtaaacccgaaacctggatggtcgaggtttgtccggttttacgatctgtcacgttcaactgcaattgaccatcgcggttggcaatatcgacaatataatcgttggtcaccatgcggcccggtttaccggtattaatattcgacagtagcccacctaaaatttgtgactggatggcctgagtaaagttatctaacgctgagggtgtttcaataccaaagtcatcgttatagctcggatctttataagagttttgggcctgagcgctatttaataaaaaagcgccattatttgggttaccaccaaagtttggattacggaactggaaagtcatggttccagcccaacttaatggcgaaataagcatgagtagaactactgcatgtttgacacgcattgcagcctccgaacaattttttatttagaattcatcatgcgccaaatcgcccgtacttaataacgcctgatttatctggcgacgatttagtgcttcttcagtttgaatcagtgcaaagacgacagttttctcgaagtctcttttcaacggaaataaaaaagtctggaaaataacgtcctgattgaccgttatagtgatccagcttccccatcgtgcactgggcctttcattaatcgttaagttacccgtatagtcactttcccatttatcactaaaggctcggtaaaaatcatggccaatagatgaaacagtatggtcagttagcaatcccgggacttctacctcaacggcgtgaagattccctgcggcgaacagaaattctgccgccacaatccagcgtaaataacgtttcatggctttatcgcctgaggttatcgtttgcccaagaaaccgcttgtgtccggttttttacggctatcttcttgaaaagattataaagatgcgttttaaccgtattttcgctgatgaacaacgaacgagcgatctcgttattagacgcgccgatacgcagcttattcaggatctctttttcccgatgagtaaggagggctgattccgtgctgttataacgatagttacctgaatgcgtaatcaggtagctggcaagcttttgcgtaaagtagcattcgccgcgcaggacgccttgcaacccattgacaacacgttcttgatcctccatggaataaaaaacgccgttgatatgaggccagttttcaatgtcgcggtacgggtaatcttcaggcgtatttagcaacaatattttgatattgttgtttttcctgctcaaagtatcctgccaataatggataagctttttatccgcttccatcatatccagaagaataatagagcctgaagagatatcgtccagagaacgttgaatattatgtaattttcctgtaattgccagcgattgtttaaggtgctgcaagagagctgtcgcctgcaaagaaggtttagtgatcaacaataatgtatgaccatgaatactatggacttcattaaacatgatgaaaccccgctttttttattgatcgcacacctgacagctgcctctaaaatagaagcaccagaagtactgacagatgttgcactgctgtgtgtagtaataaatcagccctaaatgggtaaaatataaaactaatggattacatctgatttcaatctagccattacaaatcttaaatcaagtgttaaacatgtaactaaatgtaactcattatattaaaatgttaaccttaaggttttattaagtttagaaatgatagaaaagttgtacatttggtttttattgcacaattttaaaaaatcatacaaatggtgataacttactaataatgcatataaaaaatatttcggtgtagtcctttcgtcatgtaaaacgttcttgttttttctccacacctccgtggacaattttttactgcaaaaagacgaggtttgtcacggcttgtgcgcaagacatatcgcagcaatcagcgacgggcaagaagaatgactgtctggtgctttttgatagcggaaaacggagatttaaaagaaaacaaaatatttttttgcgtagataacagcgtatttacgtgggttttaatactttggtatgaactaaaaaagaaaaatacaacgcgcgggtgagttattaaaaatatttccgcagacatactttccatcgtaacgcagcgttaacaaaatacaggttgcgttaacaaccaagttgaaatgatttaatttcttaaatgtacgaccaggtccagggtgacaacatgaaaaacaaattgttatttatgatgttaacaatactgggtgcgcctgggattgcagccgcagcaggttatgatttagctaattcagaatataacttcgcggtaaatgaattgagtaagtcttcatttaatcaggcagccataattggtcaagctgggactaataatagtgctcagttacggcagggaggctcaaaacttttggcggttgttgcgcaagaaggtagtagcaaccgggcaaagattgaccagacaggagattataaccttgcatatattgatcaggcgggcagtgccaacgatgccagtatttcgcaaggtgcttatggtaatactgcgatgattatccagaaaggttctggtaataaagcaaatattacacagtatggtactcaaaaaacggcaattgtagtgcagagacagtcgcaaatggctattcgcgtgacacaacgttaatttccattcgacttttaaatcaatccgatgggggttttacatgaaacttttaaaagtagcagcaattgcagcaatcgtattctccggtagcgctctggctggtgttgttcctcagtacggcggcggcggtaaccacggtggtggcggtaataatagcggcccaaattctgagctgaacatttaccagtacggtggcggtaactctgcacttgctctgcaaactgatgcccgtaactctgacttgactattacccagcatggcggcggtaatggtgcagatgttggtcagggctcagatgacagctcaatcgatctgacccaacgtggcttcggtaacagcgctactcttgatcagtggaacggcaaaaattctgaaatgacggttaaacagttcggtggtggcaacggtgctgcagttgaccagactgcatctaactcctccgtcaacgtgactcaggttggctttggtaacaacgcgaccgctcatcagtactaatacatcatttgtattacagaaacagggcgcaagccctgttttttttcgggagaagaatatgaatacgttattactccttgcggcactttccagtcagataacctttaatacgacccagcaaggggatgtgtataccattattcctgaagtcactcttactcaatcttgtctgtgcagagtacaaatattgtccctgcgcgaaggcagttcagggcaaagtcagacgaagcaagaaaagaccctttcattgcctgctaatcaacccattgctttgacgaagttgagtttaaatatttccccggacgatcgggtgaaaatagttgttactgtttctgatggacagtcacttcatttatcacaacaatggccgccctcttcagaaaagtcttaatttgttgaaatatcgagcataagatgaatctggagagaatggtctgctgcgaatcagccaacctgaaagtatggataacacaaccctcaaggatgactaatcattgaggaaatagaataaatgttcagaccttttttaaactctcttatgctcggcagtttgttttttccttttattgccattgctggaagcaccgtgcaagggggcgtgatccatttttatggccaaattgtggaaccggcatgtgacgtcagcacccagtcatcacccgtagaaatgaactgcccacagaatggttctattccgggcaaaacctactccagcaaagcgttaatgagcggcaatgtcaaaaacgcgcaaatagcctcagtaaaagtgcagtatcttgataaacagaaaaagctggctgtaatgaacatcgaatataactaagtttctgaacaactcacgttgctgagcagaaaaatgcgatttaaccaaaaagcctgctgtacacttaagaaacaagaaggtgtaaggaggcgttatgaaaacgcgtattcatgttgtgcagggtgatattaccaaactggccgttgatgtgattgtgaatgcggctaatccgtcattaatgggaggcggcggcgtcgatggggccattcatcgcgcagcgggtccggccctgctggatgcttgtttaaaagtcaggcaacagcagggcgattgccctacggggcatgccgttattacgcttgcaggcgatcttcccgctaaagccgtagtgcacaccgtcgggccagtctggcgtggtggtgaacaaaacgaagaccagcttttgcaggatgcctatctcaatagcctacgactggtggcggcaaacagctatacgtcagtggcttttcctgcaatcagtactggggtttatggttaccctcgtgcggcagcggctgaaatcgcagtaaaaaccgtttcagaatttattacccgtcacgctttacccgaacaggtatactttgtctgttatgatgaagaaaacgcccacctctacgaaagactccttacccaacaaggagatgaatgatttgccccggctggcgagcgcggtgctgccactgtgttcgcaacatcccggtcagtgtggcctttttcctctggagaaaagtctggatgcgtttgccgcccggtatcgtctggccgaaatggcagagcatacgctcgatgttcagtattacatctggcaggacgatatgtcgggtcggttactgttttccgccctgttagccgcagcaaagcgtggcgttcgcgtccgtttgttgctggacgacaacaatacgcccggacttgacgacattttacgcttgcttgacagtcatccacgcattgaagtccggctttttaatcctttctcgtttcgcttgctgcgtccgcttggttatatcaccgacttttcccgtcttaatcgccgtatgcacaataaaagtttcactgtcgatggcgtggtgaccctggtgggaggacgaaatattggtgatgcctattttggagcaggggaggagccacttttttcggatttagatgtcatggcaataggacccgtggtagaggacgttgccgatgatttcgcccgctactggtattgcaaatcggtttcacccttacagcaggtgctggatgtcccggagggtgaaatggcggatcgcatcgagttacccgtctcctggcataacgatgccatgacgcatcgttatttacgcaaaatggaatccagtccatttataaatcatctggttgatggaacattgccgcttatctgggcgaagacacgtttattaagtgatgatccggcgaaaggggagggcaaggcaaaacggcattcactgttaccgcagcgcctgttcgatatcatgggctcacccagtgaacgcatcgatattatctcttcctattttgtaccgacacgcgcaggtgtggcgcaactcttacggatggtgagaaaaggggtaaagattgcgatcctaaccaattctcttgccgctaacgatgttgctgtcgtccatgccggatacgcgcgctggcgcaaaaaattgctccgctatggcgtggaattatatgaactcaagccgacgcgtgaacaaagtagtacgttacacgatcgcggcataaccggtaattccggagccagcctgcatgctaaaacctttagcatcgatggtaaaacggtgtttatcggctctttcaatttcgatccgcgttcaacattgctcaatactgaaatgggcttcgtgatagagagcgaaacgctggcacagttaattgataaacgctttattcagagccagtatgatgcggcctggcagctccgtctggacaggtggggacggatcaactgggttgatcgtcatgcaaagaaagagattattctcaaaaaagaacccgccaccagtttctggaagcgggttatggtcagactggcgtcgatattgcccgtggaatggttattgtaaatgtggcttaacgggctggtgctttatcgttctcacgcttaacaaccggtttaccagagaacaaaaacttcagtaacgggatgcgcaaatgaatttcatacagaattatcgcaatccctactacaaatatcaggccacagagaaaaccaagccagttggaggtgatgtgcggtgtaatgtatgcgccgaaaaacagcgttaacgggtggtgaaccagatagataaacagcgatgcgttaacaaaataagtcacccgcgctgactggaagttaagcaaacggtggccaaaggagaagaccacattcaccatccacagaccgaggaccatggtgatcaccgactcggtttcgtacatccaggcatcgccactgccatagcgctggttgagtaaataagcgacaaacgccaatgctgctgcaagggtacagccacgagacggcgtggtaaacaaggctttaagatgagggaaaatgaaagccagtgcgccgaggataaagaacggcaaataaaacagcgtttgcatgacaataaaattgaacatgccattactcagaatgggcggatacacaataaaaatcgttcttcttattaccgcataaccgatgccgaggcataaaaaaatcaccgatagttttaccatcgagaattttttattcgttttatcagaattttctaaattatttctgatgcgcttaaatatccatacgcacagcgtcgtcatgaccactaacaccagtaaaaaccacaggtgtgatattaattcccaggccaacgtattatatttgtcatacaatgacagcccaggccaactttccgcttttcctttgacatattgcagcataataaattgcggtaatgtcagtagggggatggctgttaacatcgggatacctacacgttcgacacgtactttccaccattttttcaagggatagcgtaaaaaaagcatgtaggaaaagtagccggatataacgaaaaatacctgcatgcggaacgagtggatgaagtcattaaaaagggtcagccacaatgatgattcggcgctattcacatgccatgtatggctcgaatagattaaagaaatatgaaaaggtatccctaacaacatcagccaggcgcggatggagtcgaggaaatattcacgttgcgcgggtactgggttcatatatggttaactaatctcggatttttcgtcttatccctgtcgggttatgcctttaggcttgttgccatagtgacaccgacctgaccgcgacaggcgcaggcttcaaggtttttatgcatagcatcatcgctaccactaaccagaatggaagcgtctgtaagacggttgataaataaatttgctggcaaaccctacacgaagtcgatgcttctgtctttaggagaagcacggaaagtgaaaacggttgcaatcaggtgcttaatccatgagccagcgtgctgaacgataccgggattctgttgtcggaatggctggttatccattaaaatagatcggatcgatataagcacacaaagggggaagtgcttactaattatgaaacataaactacaaatgatgaaaatgcgttggttgagtgctgcagtaatgttaaccctgtatacatcttcaagctgggctttcagtattgatgatgtcgcaaagcaagctcaatctttagccgggaaaggctacgagacgcccaaaagcaacttgccctccgttttccgcgatatgaaatacgcggactatcagcagatccagtttaatcatgacaaagcgtactggaacaatctgaagaccccattcaaactcgagttctaccatcagggtatgtacttcgataccccggtcaaaataaatgaagtgactgccaccgcagtcaaacgaatcaaatacagcccggattatttcactttcggcgatgttcagcatgacaaagatacggtaaaagaccttggctttgccggttttaaagtgctttacccgatcaacagcaaagataaaaacgatgaaatcgtcagcatgctcggggccagctatttccgcgtgattggtgcaggtcaggtttatggcctttctgcccgcggcctggcaattgataccgccttgccatcgggtgaagaatttccgcgcttcaaagagttctggatcgagcgtccaaaaccgactgataaacgtttaaccatctatgcattgcttgactcgccgcgtgcgacaggtgcttacaaattcgtggttatgccagggcgtgacacggttgtggatgtgcagtcgaaaatctatctgcgcgataaagtcggcaaactgggggttgcaccgttaaccagtatgttcctgtttgggccgaaccaaccgtcgcctgcaaataactatcgtccggagttgcacgactctaacggtctctctatccatgccggtaatggcgaatggatctggcgtccgttgaataacccgaaacatttagcggtcagcagcttctccatggaaaacccgcaaggctttggtctgttgcagcgcggtcgtgatttctcccgctttgaagatctcgatgatcgttacgatctccgtccaagcgcatgggtgactccgaaaggggagtggggtaaaggcagcgttgagctggtggaaattccaaccaacgatgaaaccaacgataacatcgtcgcttactggacgccggatcagctgccggagccgggtaaagagatgaactttaaatacaccatcaccttcagccgtgatgaagacaaactgcatgcgccagataacgcatgggtgcaacaaacgcgtcgttcaacgggggatgtgaagcagtcgaacctgattcgccagcctgacggtactatcgcctttgtggtcgattttaccggcgcagagatgaaaaaactgccagaggataccccggtcacagcgcaaaccagcattggtgataatggtgagatagttgaaagcacggtgcgctataacccggttaccaaaggctggcgtctggtgatgcgtgtgaaagtgaaagatgccaagaaaaccactgaaatgcgtgctgcgctggtgaatgccgatcagacgttgagtgaaacctggagctaccagttacctgccaatgaataagacaactgagtacattgacgcaatgcccatcgccgcaagcgagaaagcggcattgccgaagactgatatccgcgccgttcatcaggcgctggatgccgaacaccgcacctgggcgcgggaggatgattccccgcaaggctcggtaaaggcgcgtctggaacaagcctggccagattcacttgctgatggacagttaattaaagacgacgaagggcgcgatcagctgaaggcgatgccagaagcaaaacgctcctcgatgtttcccgacccgtggcgtaccaacccggtaggccgtttctgggatcgcctgcgtggacgcgatgtcacgccgcgctatctggctcgtttgaccaaagaagagcaggagagcgagcaaaagtggcgtaccgtcggtaccatccgccgttacattctgttgatcctgacgctcgcgcaaactgtcgtcgcgacctggtatatgaagaccattcttccttatcagggttgggcgctgattaatcctatggatatggttggtcaggatttgtgggtttcctttatgcagcttctgccttatatgctgcaaaccggtatcctgatcctctttgcggtactgttctgttgggtgtccgccggattctggacggcgttaatgggcttcctgcaactgcttattggtcgcgataaatacagtatatctgcgtcaacagttggcgatgaaccattaaacccggagcatcgcacggcgttgatcatgcctatctgtaacgaagacgtgaaccgtgtttttgctggcctgcgtgcaacgtgggaatcagtaaaagccaccgggaatgccaaacactttgatgtctacattcttagtgacagttataacccggatatctgcgtcgcagagcaaaaagcctggatggagcttatcgctgaagtcggtggcgaaggtcagattttctatcgccgccgccgtcgccgcgtgaagcgtaaaagcggtaatatcgatgacttctgccgtcgctggggcagccagtacagctacatggtggtgctggatgctgactcggtaatgaccggtgattgtttgtgcgggctggtgcgcctgatggaagccaacccgaacgccgggatcattcagtcgtcgccgaaagcgtccggtatggatacgctgtatgcgcgctgtcagcagttcgcgacccgcgtgtatgggccactgtttacagccggtttgcacttctggcaacttggcgagtcgcactactggggacataacgcgattatccgcgtgaaaccgtttatcgagcactgcgcactggctccgctgccgggcgaaggttcctttgccggttcaatcctgtcacatgacttcgtggaagcggcgttgatgcgccgtgcaggttggggggtctggattgcttacgatctcccgggttcttatgaagaattgccgcctaacttgcttgatgagctaaaacgtgaccgccgatggtgccacggtaacctgatgaacttccgtctgttcctggtgaagggtatgcacccggttcaccgtgcggtgttcctgacgggcgtgatgtcttatctctccgctccgctgtggtttatgttcctcgcgctctctactgcattgcaggtagtgcatgcgttgaccgaaccgcaatacttcctgcaaccacggcagttgttcccagtgtggccgcagtggcgtcctgagctggcgattgcactttttgcttcgaccatggtgctgttgttcctgccgaagttattgagcattttgcttatctggtgcaaaggaacgaaagaatacggcggcttctggcgcgttacattatcgttgctgctggaagtgcttttttccgtgctgctggctccggtacgcatgctgttccatacggtcttcgttgtcagcgcgttccttggctgggaagtggtgtggaattcaccgcagcgtgatgatgactccacttcctggggtgaagcgttcaaacgccacggctcacagctgctgttagggttagtgtgggctgttgggatggcgtggctggatctgcgtttcctgttctggctggcaccgattgtcttctcgttgatcctgtcaccgtttgtttcggtgatttccagccgtgccaccgttggtctgcgcaccaaacgctggaaactgttcctgatcccggaagagtattcgccgccgcaggtgctggttgataccgatcggttccttgagatgaatcgtcaacgctcccttgatgatggctttatgcacgcagtgtttaacccgtcatttaacgctctggcaaccgcaatggcgaccgcgcgtcaccgcgccagtaaggtgctggaaatcgcccgtgaccgccacgttgaacaggcgctgaacgagacgccagagaagctgaatcgcgatcgtcgcctggtgctgctaagcgatccggtgacgatggcccgtctgcatttccgtgtctggaattccccggagagatattcttcatgggtgagttattacgaagggataaagctcaatccactggcattgcgtaaaccggatgcggcttcgcaataaaaacgtagttgcctgatgcgctacgcttatcaggcctacatcgttcctgcaatttattgattttgcaagactttgtgggtcggataaggcgttcacgccgcatccggcaaaaacaacgagccaataaaaataccggcgttatgccggtatttttttacgaaagaggtatcaaatgcgtttaattgtggtgagcatcatggtgaccttgctgagtggctgtggcagcattattagtcgcactataccggggcaggggcatggcaaccaatattatcccggtgtgcaatgggatgtgcgtgactccgcctggcgttatgtcacgatccttgatctgccattctctctggtttttgatactttactgctgccgatcgacattcatcatggcccgtatgagtgattaacgttcatcccactcatcagctgctgcgcgtccttcctcggtatccagcggtggctcaagctgaaattccccctcgtcccattcatgtaatgtattctcttcctgccactcctggcatatctctatctcatcatagtcgccatcaaaaacactttgcgcggcttcaccgctaagcataggtaaacattcaccttcttccccttcgtcggcaaaaaactcaacttgccacatgatgtcgccgtcctgcaaaacgtatttttgggcattgaactgttgcacattcgcatcttcggcgtcgatgccggggttgtctgcaagaaattcttcgcgtgcagcgtcaatggcttcttcaagcgttgcgtacatggtcatcacgattctccctttgagttgatgaggtttcagggaaaaggatagctgattctccgcttttgcaagtatgaaaggcgaaaaatcagttcgatacctggggtattcgacgacgacgtagactgttccatgaatagactgcgttgaataacactacgccagcggtgacgagaaataccgctctgaaaccgtagttcgctgaaatcgctgctcccatcaatggtccggtaacgttgccaatatcacgaaacgattggttatagctgaagatacgcccggcgatctggttgctcgagttgtaaaccaacagtgtctgtacggcggggagtagtgcaccatcggcggcaccgagcaaaaaacgtaaaatcccaagttgcaatggcgtctgaacgtaagacattgggatcaacagcagtacagaaaagatcagcgctgtaatcaggatcttttcgggtccgattcgatcgccaagtttgccgagtcgtggtgcacttagcagagccgccacgcctggcaccgaggcgatcatgccactgataaaggcgacgttactgacgttacccgccagttcgcggacatacagcgtcagaatgggggcaattgagcccgtcgccacctggatgattaacgtagtgacaaacaggctgagtaccagtttcgggtttttaagtgatgtcaccacttcccgcatgtgcagcatctcttttttgctgaccggctggaatttttctctgatgcaaaacagggtgacgaaaaagcagagtatgagcacactggcggtaataaagaataccggacgtaagccgtagctatcggcgagcaggccgccagccattgggccgagcaacgcaccactaacgccgcctgtggagagcgtacccagcgcccagccgcttttattacgcggtacttgtgtggcgataagagcattagcgttggggacaaatccgccaagtaacccaagaagcgcccgcaggatcaaaaactgccagatattttgtgccagccccatcaacaccatcacgatgcccatgccgagggcagagcgtaatagcatgagttttcggcctttacggtcggcgagtccaccccaaaacggtgaggcgatggccgaaaataaaaatgtaatgctgaagacaataccggaccacatattcagggcggagtgaccggtaacgccaagctgctcaacgtagaggggtaagaagggcattaccagactgaaggcggcaccggtaagaaaacagcctagccaggcgacgatcaggtttcgtttccagtttataggggtgtcattttcacagggtgacatagcaatccgctgttggtgcgccaggcgcggtgaacataagaagaaaagataagcacactaattatgcgcccgacttccagggggcgcaatccagagagcttttatcgctaaatcagggggatttgctgtggtaatgccggatgccattctgaagcatccggcatgggagatttaatagcgtgaaggaacgccttccgggcgtgttttaaagcgacggtgtaaccacatatactgctctggtgccatcatgatgcatttttcgaccactttgttcatccacgcggcggtagtttcggcatcatccagtggcggagaacactctggcggcagcataatcaattgataccctttgccatctggcttacggcgtggaacgaagggcaccagacatgcgccggacatccgtgccagcatccaggttccggtcgtggtcgcagcctgctcaacggcaaacaacgggacgaaaacgcttgagcgcgggccgtaatcatgatccggtgcgtaccagaccacttcgccttttttcagggctttaatcatgccttttaaatctttgcggtcgagcatcgatttatttgagcgcaaacggccccaggtttgtagccagtcaatcagtggattatcgttcgggcgataaacgccaatacccggttcctgcataccaaactgccgcgcacccagctccagtgtcagaaaatggatgccaactaacaggatgccgcgtttttgcgcctgcacgtcacgaatgtgttccatgccgatcacttccgtccagcgggcgattcggcggtccggccagaaccacgccatgccggtttccatcaggcccatgccaacggattcgaaattcttcaccaccattttacggcgttcttgttcgctcatttccgggaagcacagttccaggttgcgatgcacaatttttgcgcgtcgtttcataaaacgtaacgccagttttcctaatccacaaccgaggcggtagataaccgggtagggcaattgcacgactaaccaaagtacgccaatacccaaccaggttaaccaataacgcggatgaagcagtgcggtggagaacttgggtagattcgtcatatcaatcctgtttttcaacctattcgggcaattgtatgtattgtcgcattttttcgcccgcaaccaaaatttgtggctgaagactgggcgaaattgccgcgcttgtaaataacaaataatttttaatgcgcaaatgtagcgtaaaatgtgtggatgttaattatcgataattgctatatcatgccgcggatttttactttcccatctcgcaggaaccgtacaccatgccagtgttacacaaccgcatttccaacgacgcgctaaaagccaaaatgttggctgagagcgaaccgcgaaccaccatttcgttttacaagtatttccacatcgccgatcctaaggcgacccgtgacgctttatatcagctgtttaccgcgctgaatgtttttgggcgagtgtatctggcgcatgagggcattaacgcgcaaatcagcgtacctgcgagcaatgttgaaacatttcgcgcgcagctctatgccttcgacccggctttagagggtttacgcctgaatatcgcgttggatgatgacgggaaatccttctgggtactgcgcatgaaggtacgcgatcgcattgttgccgacggtattgacgatcctcactttgatgccagcaatgttggtgagtatctgcaagcggcggaagtgaacgccatgcttgacgatcccgatgcactatttatcgacatgcgtaaccactatgagtatgaagtggggcactttgaaaacgcgctcgaaattccggcagataccttccgtgagcagctgccaaaagcagtcgagatgatgcaggcacataaagataaaaaaatcgtcatgtactgcaccggcggcattcgttgtgaaaaggccagtgcctggatgaaacataacggattcaacaaagtctggcatatcgagggcggaattattgaatacgcccgtaaggcgcgcgagcagggcttgccggtgcgttttattggcaaaaattttgtttttgacgagcggatgggcgaacgtatatcggatgagattatcgcgcattgccaccagtgcggcgcgccgtgcgacagccataccaactgtaaaaatgatggctgccacctgctgtttattcagtgtccagtatgcgcggaaaaatacaaaggttgttgtagtgagatttgctgcgaagaaagcgcgttaccgccagaagaacagcgacgccgtcgggcaggacgtgaaaatggcaataagatctttaataagtctcgtggacgtctgaatacaacactgtgcattcctgatccaacagaataaatatcattgccggatgcgtgccatccggcaacatttcacgcttacttctgctgtacgccttccactgaaataatcagatccacttcctgagaagctggacctaaatctgtcttgatattgaagtccttgagcttaattttgccttcggcctcgaagcctgcacgtttaccaccccatgggtcgtcgccctgaccaattaatttcgcttccagcgtgacgggtttggttacgccattcagcgtcagatcgccggtaatatccagttcgtcaccgtctttcttcacgctggtggaggtgaatgttgcctgtggatattttgcggtattgaggaaatctgcactgcgaagatgtttatcgcgttcggcgtgattagtatcgacgctggtggtgttaattgtcacattcactttatcggcagccggatttttttcgtcaaaggtaaaagtaccgtcgaaatctttaaaggtgccgtataaccagctatagccaaggtgctggatgcggaaattaacaaaggcgtgctgaccttctttgtcaattttgtaatcggcggcaaccgctgaaccggcagagaacatcagggacgcgaaggttaaaccaagcaggctttttttcattttttatactccatagtcagatgacgactttcccagcatgcgcttcagagtgtcgtctttatcgatgaaatgatgcttcagggccataaatccgtgcataacggacagtactacgacgctccacgcgagccaaaaatgcagggcaccggcaaagtctgcctgtgcgccagcgtcggcaagggtcgcggggacgtcaaaccagccaaaaacgctgatcggtttaccatcggcagttgagatcagatagccgctgatgccgatggcgaaaagcaataggtacaatgcgagatgtccagctcttgcggcaagacgagtcatgggcgaataactcggcagcggacccggcggtggagatatgacacgccacagaacgcgaataaccagccccatcattaacaaaataccgatgcttttatgcagttcgggtgctttgtgataccagccatcgtaataactgagcgtgaccatccacagacctaaagcaaacatgccgtagacaataattgcgcttagccaatggaaggccgcagatataacaccatagcgttcaggggtatttgtgaatgacataagtgcatccaaaacgaatttgcgagagaaagaaaatggcgtgtcggagaatgaattgcaacacaaaaataacaaattgaatgatatttatttttatttcaataattttgaattaataatgaaagaatcttcataagtttagtgggttcagcatcagagatgtctggtgagtgctgtagaagcaggaataatctcattcaatttttcacgctaaatgaaagggagattaaatatttgtcagtttatgtcagtgcggaaaactaaaaataaaacacatagatcagatccataattgccaacaatccccagagaaaaagataaagcatcagatgctcgcgaatattattgatgagatagtgcaacagccgacgcattaaatactcctgtaaaaacggcctcattctggaggccgtaatgatgattattggaagcgggaaagcctgaatggcgtcaaatcaaaatcgctttttttgtcttgcgcaaaatcggcagctatttcccctaaaactgacgcaaatttaaaaccgtgcccactcaggccggtaatgagcagtgtattatcgtggccgggtagggtatcgataataaaatcttcgtcaggcgaattatcataggtgcaggcagcgccgtacaggcagcaaccgatacccggcaatacattgcgcaagaacgggaaggcttctgacccatcactggccacttccgcaaacggaacacgttcatccgctgaatggataacctggcctccgttatgtttgccaatcttcaacgcgtcgttttctgccggaaaaccataatattgatcgccattgggcagttcaccggtaaacgccgggaatttattcttcacgctatagcggccatcggcctgataccaggcaaatactttgcgtacgggctggacaggcagctccgggagcaggtcttttacccatgttcccgcgcagacaatcgcttttttcgcctgatactcaccgtcagccgtttcaatagttacgccatcatcgtcatgacgaattgcggtgaccgggcagttgaacagttgcgcacagcccgcttccttcgccagttggatccaggttttaatcgccagttcgctgcgcaaaaaaccggaatcagtttcaaataagccgatgtagttgtccgggacgcgtatttccggccagcgggccataatcccttgcgcatcgagcttttcaacgttgagttgccattgttcggcgctgtgggcgacgttggcgagaaatgtggaatcagccgggccaaggttaatgacgccagagcgtacaaaaatgggatcttcttcgttgtggcgggagagttcatcccacagcgtttgcgcgcggaggaccagcgggacatacttttcgccttcaccataagcatggcgaattaatcgcgtatcgccgtggtggctgccgtgttgatgcggtggcatatgggcgtcggtcattagcacgtttaaaccggcgcgggttgcataatacccggcggcagcgcctacggaaccgctgccaataatgatgagatcgtatttcatttttttctctctgctctcatggtttaagcagagtaattaactgaatgcagatatacaacccagaaatggtaaaggcaccggtgaggtgccttttgggtggatggtcatgtcatgttaatgacgccgatactcgtttacctggaaatcaccggattcaattttggcgattcctgcttctaatatcgaaataaattgtctggcaacatcagtggttaaccagagcgtctgaccaacttcagtcccttcctgctcggacttatttggggtctggtagtgcaaacgcaacatcagcgcatcatagctatcaacggtgctgatgtcccaccctacgagcggatgagtctgaatgacttcattatttttttccatcatggccccctaattcgtgttactagacaacgttattcgaggttcaatgcgtttttatctgaagcaacttcagtataccaataagtaagggtattcaccgaatttttaaagggggaaacagataaatttctgcttttaagatttatatgaacaataaaacagcatgtcattcatatttttttagcatattgtgcaattattttgaggaagtgtagaaattttgtactcaaaattcgtaagtaaaataaaaaagccggggcgacccggcaaaaaaaaatcactgcatattattcgctgacaaaccagtcatcggcgctttcccacgtttcctggagaatttcactaatgcgctgtttatcttcttttgtcgcgccaataaccgataaattattcgctgcggcataacgtaccgatacgtggccttcattatcaggaaacgcatactgaatacggcgggaaagttcgccagccagggcgtcaatagccccagctggcaatggagaagttttcgctatggtgacttcaattcgcataatagccccctgttgaatatactggttatttatacaggtaaaataacctaatgacaacaggaagctacgatttttattgtttaacggaccagcgtaccgtttccccggcgaggaatggcaccagcgtgtcatcagtcagtgcgatgctttcagcaacctgttgctcttcacgtaccagttcgatgaatgtgtcgttgaccggcaacccatagaactgcgggccgtttacagaacagaatgcttcaaagtgctgcaaagcattcatttcttcaaagacggtagcgtaactgcccagcgcggttggggcgttgaagcagcccgcgcagccgcaactgctctctttgcgatgacgtgcatgtggcgcagaatccgtaccgaggaatactcgattaaaaccgctggcgaccagttcacgcaatgcctgttggtgaatattacgtttgaggatgggtagacaatacaggtgcggacgcacgcctccaaccagcatatggttgcggttaaacatcagatgctgcggagtgatggtggcagccagccgttcatttccgtcacggacatagtcggcagcatctttggtggtgatgtgctcaaaaacgactttcagcgcagtcaggcgctggcgcagaggttccatcacgctttctataaagcgcgcttcacgatcaaaaatgtcgatatctgcatgtgtcacttcaccatgcaccagtagcggcataccgattttttccatgcgctcaagtaccggcatgattgcgtcaattgacgtcacgccgtggctggagttagtggttgcgtttgccgggtaaagttttgcagcggtgaacacgccttcgttaaatccgcgctccagctcattaggatccagcgaatctgttaaataacaggtcatcaatggggtgaaatcgtgcccggcaggtacggcgtcaagaatacgctggcgatacgccacggcagcctcaacggtggtcacgggcggagccagattgggcattacgatagcccgtccataaatttcgctggtatatggcacgacagtttttaacatgtcgccatcgcggaggtgaaggtgccagtcgtctgggcggcggatctttaatacctgggatggtgcagtcattaatctctatgctccggctgaagggatgtttttgccggacacaaaggataagcggaaacgttttcctttgcacgaaaaataaagggcgcgaatgcgccctcgtgattaatcagtaaatggaatgacaatttcgcctggcttcacttcaatgcctttcgccagttttttcgccattgcttcgccctggctgccatcttcgcgcaggacgtaagcaggttgctggttaaagtaattgcgtaatgcctggttcaaatagggaagcaacgtttgcatcaccgtttgcattttttccggttgtaccgtcgcatcgaccacttccatctctttcaggaagatcgcacctttttctttatcaaacacgggcagcgctttcagcttcagtttcatggtcgctttctgactaccgaacagggagttcatgtccagattggcgtctccggttagggtaaccttattcggctcttcgcgaccaatttggctggtcaggtttgtcagaacaatatgggcgtcagccacgccgggtaaaccgatatcttttgagaaattattatgtttcgcaagcgactggttaatttcttgttcggtgatggtgtattgggtgagttgattacagccaacgagcaggccactgacgatcaatgcagcggcaaataaaaacttgttcatggtagtcctcgacatgaaatctgcgtcaatatcctgacacaacgcagcatgtgtcaccagcgataaactcgccagcagaaaaaactgaaaacggcggcaacccgcgaatacaggctgccgcggcgggtcaggattaaatcgccattgatgataacaaattgatttgtgtctgtttcgccatattatcgcggtaatcagcaacgcggcttggccagttaattccggctaccagcgtcagattacgcagtagcgggaatagctgaatatcatcttccgaaagttcgccattcacggcgttcggtttgacgatcagtttgtccagcgcacgtaaatcatcgctgatattcttaatcagaccgtcagagtgggccagcaggtcggcaaaattacccgcgctggcctctttcttgtcgacgaaatatttgcgcgcggcgggagtagaaaactcatcaaatgccgatttggcaaaacgcggcaacagcagtttgttggcgtagccattgaccttgcgcagccactcttcaatggcaggggaacgtttgccggtcagtaacggtttgccgtcgagtttatcgacatagtgaacgatgtccatgctttctggcatatagcggctgtcatctttttgcagaatgggaacctgtttttgaccgaccatccgggtgggtgtttctgcgtcgtcgttgagcagaacatgtaattcgacggggatatttttcaggccgaaaatcatgcgggctttgaggcagtaagggcagtgatcgtaaatgtatagcttcacgtgactcctccatttggctgtcagttcactttcagtatggaggagtcaggggggagtatcaaatcaggcgtcgcgttcaagcaaacgacgcgcggcgcgtttctggctaaactgccaacccagcgcaaggaaagtgaagatgccaataatgcccagcatcatccacggaagctctggctggtgcgccgatttgcccaggtcaaacagccagccgccaccgatataaccaatagcgccgccaatcgccagacccagacggctaaaccccatatagctgccgcgagctcttgcgtccgccagcgaagcacttaaggtttcacgcgcaggctcggcaatgatcgacccgatataaaacagacaaatcagggtgaaaagttgttgcaggccgctgaccatgcccaccggcatcatgcttaatgacattatcaacagcccagccatcaaccggtgttccagacgaaaatgcttttcactccagcgggcgatagggtagagcaacgttaacgacagacacgcttcaatggcatacatccatttaacggcagagggcgcgccagccacgtcgttgaccataattggcagcatcagcatcacttgtacagccagcatgtagtaacccgccagcgtcagaacataggtgacaaaacgcttgtcacgcatcacgcgggtcatgccttcgcgaacgggcgtgcgtacggtggagagtttccatgctggtaacaaccacgcattgaacgccgcacatagcacaaatagaactgcccctgtggcgcagaccaggcgaaagtcgtattgcaacagccagctccccaacaatgcgccaatgaccgcaccggcactgtcctgcatcatcaacagcgagaaaaaacgaccacgctgctgtggacggattaatttcaccaccagcgccgaacgcggcggatcaaacaacgtgccaccgagtcccgagagcaggcatgaaaaccacaatagccacggttcgtgggcgatacccattgtggcgaatccggcggcgcgcatcagcataccggtaacaatcatcggtttggcaccaaagcggtcggcaattgcaccgccgaaaatacccagaccttgctgaataaattggcgtagaccgagagcaataccgaccatgacggcggcccagcccatttgatcaacgaagcggatagagatcagcgggaagacaacaaagaaccccagcacgaccagcatattatcgatgagcaggaaatatttacccaggttcctcgcctgcgacacgcgggacatttcccctcccgggaaataaaagatgagcactttctattctgcattgccgctaagacttttcccatcacttcggggacaatatttttttatcaaaacgtcgctttgatagagagtttttatcaaatatgtgaataatgcagaaaatggcattttggacttttcacagggtctggttgcgcaggtatagtaatacttacagcgtattaaagacgttacgggaaggagtaggtatagaatgtttggctatcgcagtaacgtgccaaaagtgcgcttaaccacagaccgactggtcgtgcgtctggtgcatgatcgtgatgcctggcgtcttgcggattattacgcagagaatcgccatttcctcaagccctgggagccagtgcgcgacgaaagccactgttatccatcaggctggcaggccaggctggggatgattaacgaatttcataaacaaggttcagctttctactttggcttattcgacccggacgaaaaagagattattggcgttgccaatttttccaatgttgttcgtggctcttttcatgcctgctatctcggttattcgattgggcaaaaatggcagggcaaaggactcatgtttgaagccctgaccgcagccattcgttatatgcagcgcacccaacatattcatcgcattatggctaattatatgccgcacaataaacgcagcggtgatttactggcgcgactgggttttgaaaaagaaggctatgcgaaagactatctgttgattgatggacaatggcgcgatcacgtactgacggcattaactaccccagactggacgcccggccgctaaggagaatctcatgaaatatcaacttactgcccttgaagctcgcgtgattggttgcttgctggaaaagcaggtgaccacgccggagcaatacccgctctcagtcaatggtgtagtcacggcctgtaatcagaaaacgaaccgtgaaccggtcatgaatctgagtgaatccgaagtgcaggaacagctggataatctggtcaaacgtcattatctacgcacagtgagcggttttggtaatcgggtcaccaaatatgagcaacgtttttgtaattcagaatttggcgatctgaaactgagcgcagcggaagtggcgttaatcaccacgttgttattgcgtggtgcccagacgccaggtgaactgcgcagccgcgccgcgcgaatgtatgaattcagcgatatggcggaagtggagtcgacgctggaacaactggcaaatcgcgaagatggtccttttgtggtgcgtctggcccgcgaaccgggtaaacgcgaaaaccgctacatgcatcttttcagtggtgaggttgaagatcagccggcggtgacggatatgtcgaacgcggttgacggtgatttacaggcccgcgtcgaagccctggaaatcgaagtggcagaactgaaacagcgtcttgattcgttgctggcccatctgggagattaaagtgaaaaaattacgtatcggcgtagtgggattaggtggcattgcgcaaaaagcgtggttaccggtgctggcggcagcgtctgactggacgttacaaggagcctggtcgcctacgcgcgcgaaagccctgccaatttgtgaaagctggcgcattccttatgccgattcgttatccagccttgccgccagttgcgatgcggtttttgtgcattccagcaccgccagccactttgacgtggtcagtacgttactcaatgcgggggtacatgtctgtgtcgataaaccgctggcagaaaatctgcgcgatgctgaacggctggtggaactggcggcgcggaaaaaactgacgttgatggtcggttttaaccgtcgtttcgcaccactctacggtgagttaaaaacgcaactcgccaccgcagcctcgctaagaatggataaacatcgtagcaatagcgtcgggccacacgatctttatttcacgttgctggatgattatctgcatgtggtggataccgcgctgtggttgtcgggcggcaaagcctctctggatggcggtacgctactgactaacgacgctggcgaaatgctgtttgccgagcaccatttttcggctggtcctttgcagatcaccacctgtatgcatcgccgtgccggaagtcagcgtgaaaccgtgcaggccgtgactgacggtgcgctcatcgacattacggatatgcgcgaatggcgtgaggagcgcgggcagggcgtagtgcataaaccgattcctggttggcagagtacgcttgagcaacgtgggtttgtcggctgtgcgcggcacttcattgaatgtgtgcaaaaccagacagttccgcaaaccgccggcgaacaggccgtgctggcgcaacgtatcgttgacaagatctggcgcgatgcgatgagtgaataaaccctgtaacatctggcggtagcaattcaccataatccaggtagactattcgcctctttcagcgcctgccttgcaggcgttttgcccgtgggtctggattagaacaccgatgaatttattaaaatcgctggccgccgtcagctcgatgaccatgttttcgcgtgtgcttggcttcgcacgagacgcaattgtcgccagaatctttggcgcagggatggcaaccgacgcctttttcgtcgcttttaaacttcctaacttgttacgccgtatctttgccgaaggggcattttcccaggcatttgtaccgattctggcggaatataaaagtaagcagggtgaagacgccacgcgggtctttgtctcttatgtttctggcctgctgacacttgcgctggcggttgtgacggtcgctggcatgctcgccgcaccgtgggtgatcatggtgaccgcgccaggcttcgctgacacagctgacaaatttgccctgaccagccagctactaaagattacctttccctatatcttgctgatctccctggcgtcgctggtgggagcgattctgaatacgtggaaccgcttctcgattccggcgtttgctccaacactgcttaacatcagcatgattggtttcgcgctgtttgccgcaccgtactttaacccaccggtgctggcgctggcgtgggctgttacggtcggcggcgtcctgcagctggtgtatcagctaccgcacctgaagaagatcggcatgctggtcctgccgcgcattaacttccacgatgccggagcaatgcgcgtggtgaaacagatgggaccggcgatccttggcgtctctgtgagccagatctccttaatcatcaacaccatttttgcctcgtttcttgcttccggttcggtgtcttggatgtattacgccgaccgcttaatggagtttccgtccggtgtgctgggcgtggcgcttggcaccattttgctgccgtcgctgtcgaaaagttttgccagtggcaatcatgatgaatacaaccgtttgatggactgggggttgcgtctttgtttcctgttggcgctgccgagtgcggttgcgttgggcattctttccggtccgttgaccgtttcgctgttccagtacggtaaatttaccgcgtttgatgcgctgatgacccagcgggcgttaattgcctactcggtgggtttgattggcctgattgtagtgaaagtgttggctcctggcttttattcccgccaggacattaaaacgccagtgaaaattgccatcgttacgctgattttaacgcaattgatgaacctggcgtttattggtccgttgaaacatgccgggctgtcactttctattggtctggcggcgtgtctgaatgcttcgctgctttactggcagttgcgtaagcagaaaatctttaccccgcaacccggctggatggcgtttctgttgcgtctggtggtggcggtactggtgatgtctggcgtgcttttaggtatgttacatatcatgccggagtggtcattgggtaccatgccctggcgtttactgcgtttaatggcggtcgtgctggcggggattgccgcgtacttcgctgcactggcggtactgggcttcaaagttaaagaatttgcccgccggacggtgtaacaatgcattccggcctgcagtgcaggccggagataatcttcagatcgaaatctttttaccgccgcgatgggttgttgaggtctgaccgttcgccccatatagcgtcggttcctgatgcggtttcaacatttccagcgcctgttgattgcgctcaatctgtccttccagtaaccagccgttatgttgattcatttggcgtagttgctgcgttttcacagtaatttcctgccagcgttgactaatatcaacgctatttgctgtattgggttctttcctgcgtaactgttcgaggtaatccagcgtcgccagcagtgagcttttttgttctgtaatccattgcaactggctgccgttgatctgccccatagagagatgttgctgctcttgatccattaccgttttgagatcgttaagcacagcggacatctggtcgaggatctctgcaagacgtgtcatacgatcagttactctgcaagtcttgctgcgcttcgttgatcagcgcatcggcaattttgccggtgtccatttttagttcaccgttacgaatcgccagttttaacgcttcgacacgttcaagattgatatcactgctgccgggttgcatcagttttgcttgcgcgtcgcttaacgtcacactggtgctggtggaggcggttgtttttgccgcccggctgttcgttaccggcgcgtcagtggtttcgcgcggttgaacggtgcttacaggcttcagaggcgaagtgcgatcaatactcatggtttattcctcattgagggcgcttttatcatgtgttgcttatttatcggcaagggacgggtaatctttaacagcttacaggtttataagaatattcccatctgcatcaacaacgccgctgactacctgtcccgataccatgcgcacccgcgcattctgtgcgacggctgcattgttcagcgcctgaccttctgcgttggcgctaaacccatcaccgctggcgatcacattgacgcgttgtcccgcttttacccgccatgcctggcgaaactgggttaactggataggttgatcgggtgatagatcgcgcaggctaatggcatcaacaagttgattgatatccagcaccgtacgcggtggcagggtatccagccgtccgcgtttcagtttgacattgccagcttccagctttcctccccgcgcaatgggcatcgcggcaaccacataatttcctgtggcctgtacattaacctgtaaatatcgtttgtcgttaccgcagcgtgccaacacattcacattgccccacaggcgggaattattgctcatcgaaagcaatggctgctcgcatggcggtagtagattgggcgctgtacgaatagaaacacgaacctcatcacttacccccgcgagttgggcgctaaaaaagttgtgcaattgcgatgtgagattgctcgccgtacttaacggactgaacagtatcgcgatgatcgccacgctacgttttattatcagcattttcgcccccagccatttctacaacgtgaattgtacctgtccgcaatgaccatcaacggcataaatagcgacccattttgcgtttattccgccgataacgcgcgcgtaaaggcatttaagctgatggcagaattttgatacctgcggaggagatatgctcgataagctcgacgccgccttacgttttcaacaagaggcgctcaatctgcgcgcccagcgtcaggaagtgctggcagcaaacatcgccaatgccgatacccctggttatcaggcgcgcgatatcgattttgccagtgaacttaaaaaagtcatgcaacgtggacgggatgcaaccagtgtggttgcactgacgatgacctcaacgcaacacattccggcgcaggcgctgacgcctcctaccgcagaactgcaataccgtattccggaccagccttcgcttgacggtaataccgtcgatatggatcgcgaacgcacccagtttgccgataacagcctgcaataccagatgagccttagcgcgttgagcgggcaaatcaaaggcatgatgaacgttttacagagcggaaattaacggatggcactgctgaatatttttgatatcgccgggtcggcgttaactgcccagtcccagcgcctgaacgtggcggccagtaatctggcgaatgctgatagcgtgaccggtcccgatggacagccatatcgggcaaaacaggtggtattccaggttaacgctgcaccaggtgctgcgacaggcggcgtaaaggttgccgatgttatagaaagtcaggccccggacaaactggtttatgaaccgggtaatccgctggcagatgcaaagggctacgtaaaaatgccgaacgttgatgttgtcggagagatggttaacaccatgtcggcgtcacgcagctatcaggccaatgttgaagtgctcaacacggtgaaaagcatgatgctgaaaacccttacgctcggtcaataaaggagaaagctatgtccattgcggtaaccaccaccgatccgacaaataccggcgtcagtaccaccagcagtagttcgctcacgggcagcaacgccgcagatttacaaagcagttttctgactttgctggtggcgcagctgaaaaaccaggacccgaccaatccaatggaaaacaacgagctgacgtcgcaattggcacaaatcagcacggtcagcgggattgaaaaactcaataccacgctcggatctatttccggacagattgataacagccagtcgttacaggccagtaacctgatcggtcacggcgtgatgatccccggcaccactgttcttgcgggaaccggcagtgaagaaggggctgtgaccacgaccacgccgtttggtgttgagctgcaacaggcggcagacaaagttacggccaccatcaccgataaaaatggcgcggttgtgcgcaccattgatattggtgaactgaccgccggagttcacagtttcacctgggacggtacgttgactgatggcagcactgcgccgaacggttcttacaatgtagcgattagcgccagtaacggtggtacacaactggttgcccagccgctgcagtttgctctggtgcagggtgtgatccgcggcaacagcggtaatacgctggatctcggcacttacggcaccaccaccctcgacgaagtacggcagataatttaagccttcacatttcaggagtcagtcatggccttttctcaagcggttagcggattaaacgctgccgccaccaacctcgatgttattggcaacaatatcgccaactccgccacctacggctttaaatcaggcacggcctcttttgccgatatgtttgccggttcgaaagtgggactgggggtaaaagttgccggtatcactcaggactttaccgatggcacgaccaccaacaccgggcgaggtctggacgttgctatcagccagaacggttttttccgtctggtagacagcaacggttcggtgttctacagccgtaacggacaatttaagctggatgaaaaccgtaacctggtgaatatgcaaggtttacagctgacgggttacccggcaaccggtacgccgccgactattcagcaaggggcgaatccgaccaatatttcgatcccgaataccctgatggcagcgaaaactaccaccacggcatcgatgcagatcaacctgaattccagtgatccgcttcctactgttacgccattcagcgccagcaatgcggatagctataacaaaaaaggttcggtgactgttttcgacagtcagggtaatgctcatgacatgagcgtctactttgtgaagaccggggataataactggcaggtctacacccaggatagcagtgatccaaacagcattgcgaagacagcgacaacactggaatttaatgctaatggcacattagtggatggtgcgatggcgaataatatcgcaaccggcgcaattaacggtgcagaacccgccacgtttagtctgagcttcctcaactccatgcagcaaaataccggcgctaacaatattgtggcaaccacccagaacggctacaaaccgggcgatctggtgagttatcaaatcaatgatgacggtacggttgtcggcaactattccaacgaacaaacccaactgctggggcagattgtactggcgaactttgccaacaacgaaggtctggcatccgaaggcgacaacgtctggtctgcgacgcaatcttctggcgtggcgctgttggggacagccgggacgggaaactttggcaccctgaccaacggtgcgctggaagcgtccaacgtcgatctcagtaaagaactggtcaatatgatcgttgcccagcgtaactatcagtctaacgcccagaccatcaaaacccaggaccagatcctcaacacgctggttaacttacgctaatcgctgacgggatagctcaatggatcacgcaatttataccgcgatgggagcagccagccagacactgaatcaacaggcggtaaccgccagtaatctggccaatgcctcaacgcccggttttcgcgcgcagttgaatgctttacgcgcggtgccagtggaagggctttctctgcccacgcgcacgttggtcacggcgtcaacgccgggcgcagatatgacgcccggcaaaatggattacacctcgcgcccgctggacgtcgcgttgcagcaggatggctggccgtgcagaccgctgacggcagcgaagggtatacgcgtaatggcagcattcaggttgatcccaccgggcaactgacaattcaggggcatccggtgataggcgaggctgggccaattgctgtgccggaaggggcggaaatcactattgctgccgatggcacaatctcggcgctcaatccgggcgatccggcaaatacggttgcgccagtagggcgtcttaaactggtgaaagccacgggcagcgaagtgcagcgcggtgacgacggcatttttcgtttaagcgcagaaacccaggccacgcgtgggccggtactgcaggcagatccaaccttgcgtgtgatgtcgggggttctggaaggcagtaacgtcaatgccgttgcggcaatgagcgacatgattgccagcgcgcggcgttttgaaatgcagatgaaggtgatcagcagcgtcgatgataacgcaggccgtgccaaccaactgctgtcgatgagttaattgaaaggatacatgacaagtataagttgcccgatgcgcaagtttatcgggtctatgggggcaatcgcaatttatcgattttgcgagcacttgtaggccggataaggcgtttacgccgcatccggcaagaagacatatgcactttgtcactaatccactacaggacattttatgatcagttcattatggatcgccaaaacgggccttgacgcccagcaaaccaatatggacgtcattgccaacaacctggcaaacgtcagtactaacggttttaagcgtcagcgcgcggtgtttgaagatctgctttatcaaaccattcgccagccgggggcacagtcttccgaacaaaccaccttaccctccggattacaaatcggcacgggggtacgcccggtcgccactgaacgcttacacagccagggaaacctgtcgcagaccaacaacagcaaagatgtcgcgattaaagggcagggctttttccaggtgatgttgccagatggttcatcagcctatacccgtgacggctctttccaggtggatcagaacgggcagctggtgacggctggtggttttcaggtgcagccagcgatcaccattccggcgaatgcgttaagtatcaccatcggtcgtgatggcgtggtcagcgtaacccaacaaggccaggcagctccggttcaggttgggcagctcaatctcaccacctttatgaatgacaccgggctggagagcattggcgaaaacctctacaccgaaacgcaatcctctggtgcaccgaacgaaagcacgccgggcctgaacggcgcgggactgctgtatcaagggtatgttgaaacgtctaacgtcaacgtggcggaagaactggtcaatatgattcaggtgcaacgcgcttacgaaatcaacagtaaagcggtgtccaccaccgatcagatgctgcaaaaactgacgcaactctaaggcttaaccggtggcaggttcaccggtttactgatttttgaagatgatagccatgcaaaaaaacgctgcgcatacttatgccatttccagcttgttggtgctttcactaaccggctgcgcctggataccctccacgccgctggtgcagggggcgaccagtgcacaaccggttcccggtccgacgcccgtcgccaacggttctattttccagtctgctcagccgattaactatggctatcaaccgctgtttgaagatcgtcgaccacgcaatattggcgatacgctgaccatcgtgttgcaggagaacgtcagcgccagcaaaagctcctctgcgaatgccagccgtgacggtaaaactaattttggctttgatactgtgccgcgctatttgcaggggctgtttggtaacgctcgtgccgatgtcgaagcctccggtggtaacacgttcaacggaaagggcggggccaatgccagcaatacctttagcggcacgttgacggtgacggttgaccaggtactggtcaacggcaacctgcatgtggtgggtgaaaaacagattgccattaatcagggtaccgaatttattcgcttctctggcgtggttaatccacgcactatcagcggcagcaataccgtaccgtctactcaggtggcggatgcgcgcattgaatacgtaggcaatggctacattaacgaagcgcaaaatatgggctggttgcagcgtttcttccttaacctgtcgccaatgtaagtgaggctgtggtgattaaatttctctctgcattaattcttctactggtcacgacggcggctcaggctgagcgtattcgcgatctcaccagtgttcagggggtaaggcaaaactcactgattggctatggtctggtggtggggctggatggcaccggtgaccagacaacccagacgccgtttaccacacaaacgcttaataacatgctctcacagctgggaattaccgttccgacgggcaccaatatgcagctaaaaaacgtcgctgcggtaatggtgacagcgtcacttcctccgtttggacgtcaggggcaaaccatcgatgtggtggtttcttccatgggaaatgccaaaagcttgcgtggaggtacgttgttgatgacaccgcttaagggcgttgacagtcaggtgtatgcgctggcgcagggcaatattctggttggcggcgcaggagcctccgctggcggtagcagtgttcaggttaaccaactgaacggtggacggatcaccaatggtgcggttattgaacgtgaattgcccagccagtttggcgtcgggaatacccttaatttgcaacttaacgacgaagatttcagcatggcgcagcaaatcgctgacaccatcaaccgcgtgcgtggatatggcagcgccaccgcgttagatgcgcggactattcaggtgcgcgtaccgagtggcaacagttcccaggtccgcttccttgccgatattcagaatatgcaggttaatgtcaccccgcaggacgctaaagtagtgattaactcgcgcaccggttcggtggtgatgaatcgcgaagtgaccctcgacagctgcgcggtagcgcaggggaatctctcagtaacagttaatcgtcaggccaatgtcagccagccagatacaccgtttggtggtggacagactgtggttactccacaaacgcagatcgatttacgccagagcggcggttcgctgcaaagcgtacgttccagcgccagcctcaataacgtggtgcgcgcgctcaatgcgctgggcgctacgccgatggatctgatgtccatactgcaatcaatgcaaagtgcgggatgtctgcgggcaaaactggaaatcatctgatgatcagcgacagcaaactactggcaagtgcggcctgggatgcgcaatcactcaacgaactaaaggcgaaagcgggcgaagatccggcggcaaatatccgtccggtggcccgtcaggtggaagggatgttcgtgcagatgatgttgaaaagcatgcgcgacgctttaccaaaagatggcctgttcagcagcgagcacactcgcctgtataccagtatgtatgaccagcagattgcccaacagatgacggcgggcaaaggtctggggcttgcagagatgatggttaaacagatgacgccagaacaaccattgccagaggagtccacgccagcagcaccgatgaaattcccgctcgaaactgtggtgcgttatcaaaatcaggcgctttcgcagctggtgcaaaaggccgtgccacgtaactacgatgattcgctgccgggtgacagtaaagcattcctcgcgcaactctcgctgcccgcccaactggcaagccagcaaagcggtgtgccacatcatttgatcctcgctcaggcggcactggaatctggttgggggcaacggcaaatccgccgcgaaaacggcgagccgagctataacctgtttggtgtcaaagcctctggcaactggaaagggccagttactgaaatcaccacgactgaatatgaaaacggcgaagcgaagaaagtaaaagcgaagtttcgcgtctacagctcgtatctggaagccttgtcggattacgttgggctgttaacgcgtaacccgcgctacgccgccgtgacgaccgccgcgagtgcggaacagggggcgcaggccctacaggacgcgggctatgccaccgatcctcactatgcccgcaaactcaccaacatgattcagcagatgaaatcgataagcgacaaggtgagcaaaacctacagtatgaacattgataatctgttctgaataactcaagtccggcgggtcgctgccgataatactctgtaattgaaggcttataaggaacctccatgtccagcttgattaataacgccatgagcggactgaacgcggcccaggcggcgttaaatacggcaagtaataatatctccagctataacgttgccggatatacccgccaaaccactattatggcgcaggccaatagcacgttgggcgctggcggctgggttggcaatggtgtctacgtttctggtgtgcagcgtgagtatgatgcgtttattaccaaccagttacgtgcggcgcagacgcaaagtagcggtctgactgcccgctatgagcagatgtcgaaaatcgacaatatgctctccaccagtacctcttcgctggcaacacagatgcaggatttcttcaccagcctgcaaacgctggtgagtaacgcggaagacccggcagcgcgccaggcgctgattgggaaatcagaaggattggtgaatcagtttaaaaccaccgatcaatatctgcgcgaccaggacaaacaggtcaatatcgcgataggtgccagcgttgatcagatcaacaactacgctaaacaaattgccagcctgaacgatcaaatctcgcgcctgacaggcgtgggggcaggggcgtcacctaacaatctgctggatcaacgcgatcaactggtgagcgaattaaaccagattgttggtgtagaagtcagcgttcaggatggcggcacttataacatcacgatggccaatggttactcactggttcagggaagtacggcgcggcaactggcggcagttccttccagcgctgacccttctcgtacgactgtcgcttatgttgatgggacggcaggcaatattgagatcccggagaaattactgaataccgggtcgctgggcggcattctgacattccgttctcaggatctggaccagacgcgtaatacgcttggacaactggcgctggcatttgccgaggctttcaacacccaacacaaagccggatttgatgctaacggcgatgccggtgaagatttctttgctatcggtaagcccgcggttctgcaaaacacgaaaaacaaaggtgacgttgcgatcggtgccacggtaactgatgcctccgcggtactggcgacagattacaaaatctcgttcgataataatcagtggcaggtcacccgccttgccagcaataccacttttacggtgacgccggatgccaacggtaaagtggcatttgatggtctggagttgacgtttacaggaacgcctgccgttaacgacagcttcacgctgaaaccagtaagtgacgccatcgtcaacatggatgtattaatcaccgacgaagcgaaaatagcgatggcgagcgaagaagatgcgggtgatagcgataaccgcaacggtcaggccctgctggatctgcaaagcaacagtaaaacggtgggcggtgcgaaatcctttaacgacgcttatgcctcgttagtgagtgatatcggtaataaaaccgcgacgttgaaaaccagtagcgccacgcaaggtaatgtggtgacgcagctttccaatcagcagcagtcgatttccggtgtcaatctcgatgaggagtacggaaatctgcaacgttttcagcagtattacctggcgaatgcgcaggttctgcagacggcaaacgcgatttttgatgcgctgattaacattcgctaaggggagataagatgcgtttcagtacacagatgatgtaccagcaaaacatgcgtggtatcaccaattctcaggcagaatggatgaagtacggcgaacagatgtcgacgggtaagcgagtcgttaacccttctgacgatcccattgctgcatcacaagccgtagttctctcccaggcacaggcgcaaaacagccagtacacgctggcgcgtactttcgccactcaaaaagtgtcactggaagagagtgtacttagccaggtcaccactgctatccagaatgctcaggaaaaaattgtctacgccagcaatggcaccttgagtgacgatgaccgggcctcgctggctacggatattcaggggcttcgtgaccagttgctgaatctggcaaacaccactgacggtaacgggcgctacatttttgccggttataaaacagagactgcgccgtttagcgaagagaaagggaaatacgtcggtggagcagaaagtattaaacaacaggtcgatgcttcgcgttcgatggtgatagggcacacgggtgacaaaattttcgacagtattaccagcaacgcggtagcggaaccagacggtagcgcttctgaaaccaatctttttgccatgctggatagtgccatcgcagccctgaaaacgccggtcgcggatagcgaagcggataaagaaaccgccgctgcggcgttagataaaaccaaccgcggactgaaaaactcgctgaacaatgtgctgactgttcgcgcggaattaggcacgcagctgaacgaactggagtcgctggattcattaggtagcgatcgcgctttagggcaaacgcagcagatgagcgatctggttgatgtggactggaatgcaactatttcatcttacatcatgcagcaaacggcattgcaggcatcgtataaagcatttaccgatatgcagggattgtcgctcttccagctcagcaaataatttcgctttaaaacatatcatgaaactgggtatgttttgtctgcctgctctgggatcgctggggcgggcatttttttgcctattttgcattgttggttagcaaggatgccattcgatgaattttaatatgttgattcaaagatgaaataaaaaagccctggcagttaccagggcttgattactttgagctaattattactcaacaggttgcggacgcgcaggagcggcagaggcatgatgtgttgccgtatgaccacctgcggcacctttaccttcgaaggcaaaagtagggcgctgccagtcactgtgacgcggtgcctccggaacatattccggtgctggagcgcgcgtcattggcgcggtagcgtggttatgctcaacggtgacctcaggttcgaccgcagctaccgtttcaacttctgctgcggcttcagcgactactggcgcggcaggttgagcaacaacttcaggttcagcaactacaacctcagcagtttcgacaacttcttcaatatctgccgtctcttcctgcggttcaaccaccggttctgcttgttctgcaacttcctgggctacggcaacatcagactcggtaatcacctgcggctgttcagttaccgcggcagcgatcacttcaggatgcgtcgtttcaaccacttccggttgcggttcggcaacctgaacgggggcttctacgacaccggccacttcttcaacaactggcgcgctaacaaccggttcgatagcggcggcgacagggacctcagtcaccatcggctgcacatgtacttcttcctgttcgcgctgctcttcaacctgtacatcttgcggacgtacaattggatagcggatccagactttgccagaggccagttccggagacgcgcacgctacggtcaacggcattggcgactgggttggataacgctcgtcacgatagcgacgacgacgctgaccacttacgcgcaggtgacgaggcgagcggcgagaacgacgcggcatgccaccgttgtcacggttatcagcattgttctcttcttgctgttctggtgcagtttgcgctacgactggcagcgggactttcaccagttctgtgcgtggagctggcgcttcctgaacaattggttcggcagcgacagtttcttcaaccaccggtgcgactaccgcttcttcggctacgctttgctcgtaacgcactttctgattgagctgacgctgtttacgacgcggctgaaccggacgtacacgttcttcctgttcggtttcctgaacagattgctcttcaacattcagcgccttcgcttcttgttgcgcctgacgtttatcatcattacggcggcggctacgttcacgacgcggcgcttgctgctcgtcggcggtacgcgctttttccgttacctcagcctgctgacggctctcacgcgtctcggcagtctgctgctgtgcctggcgacgattacgacggttttcttcgcgattatcgctgccttcagtacgttcactacgggtgtcgcggcgctcattacggtcacggcggttgttctgacgaggcttgcgacgatcctgttgacgttccggtttcgcttctgctttcggtgctggttgctcggtcggtttggtttcttcaccaccgctgaacagcgctttcagtgcgccgaagaagcggctcaacagcccaggttgtgcaggagctgctggtgttgccggtgcagctttcggtgctggagctacaacaggcgcggcaggttcagctggcgttggcgcaggcggcacatccggcatggcaaaggttgccagcgcaggttgttccggacgcttacgttcagcgaactcttcttcagacggcagcgccatcgcttcttcatgcagcttcggcagcatgtagcttaaggttggggtttcttcccctttacgcacgcgcagcacgtggtagtgcggggtttccatctgatcgtttggcacaattacacagcgcacaccgtcctgacgagtttcaatggcatttaccgcagaacgtttttcattcagcaggtaagaagcgattggcacaggaacaatggcgtgaacttcctgggtgttctctttcagcgcttcttcttcgatcagacgcagaatagagagcgacagcgattcgttgtcacgcacggtgccagtaccagaacaacgcggacaaacgtgatgactggattcacccagtgatgggctcaggcgctgacgggacatttccagcaggccaaagcgagaaatatggctgatttgaatacgcgcacggtcctgacgcaccgcttcacgcagacggttttctaccgcacgctggtggcgtactggcgtcatgtcgatgaagtcgataacaatcaggccgccgaggtcacgcaggcgcagctgacgagcaatctcatcggcagcttcgaggttagtgttaaacgcggtttcttcgatatcgccgccgcgggtcgcgcgtgcggagttgatgtcgatggccgttaacgcttcggtgctgtcgataacaatggaaccaccagacggcagacgaacttcacgctggaaggcggactcgatctgtgactcgatctggtagtggctgaacagcgggatctcgccggtgtacagtttgattttgctgctgaaatccgggcgacctaatgcagcgatatgctgacgtgccagttcgagcactttcgggttatcgataaggatttcgccgatgtcctgacgtaagtaatcgcggaatgcgcgaacgattacgttgctctcctgatgaatcaggaacggggccgggcggctttcagcggcttttttgatggcttcccagtgtttcagacggaagcttaaatcccattgcagcgcctcagcagatttgccgacgccagcggtgcgcacgataagccccatgccttccggcagttcaaggcttgccagtgcttcttttaattcggtacggtcgtcgccttcgatacggcgagaaatgccacccgcgcgcgggttgttcggcatcagaaccagatagctacccgccagactgataaaggtggttaatgccgcgcctttgttgccgcgctcttctttatcgatctgaacaatgacttcctgaccttcacgcaacacatctttaatgttgggacgaccatgagcactgtagttagcagggaaatattcgcgggcaatttcttttagtgggaggaaaccgtgacgttcagcgccgtaatcaacaaaagcagcttccagactcggttcaatgcgggtgattttacctttgtagatgtttgcctttttctgctcgtgccctggactttcgatatccaggtcatacagacgctgcccatctacaagggcaacgcgcaactcttcctgctgagttgcgttgattaacattcttttcatcgtaacttactcattattcttacattgacgactaagctgcgggcaaagtaacgcctttccgggtgtgaaccgatggcctcgtgtctagtcgcgtcgccaacctcacggttatcgtcagctcaaagaggcgcagagtgtcggttgcccgtttttcatgcggaaaaacagcgcaattatcaaagaaacagactgggtattactctccagaaatatttccatctaccggtaaggactgcaacccgcagcccgctaactgcctgaaagatcaatacgtcttacgccattgctgcgtggatgatcggtcgggcaaaatgggttattccgtaaaatttcttgttttaacaaggatggacacggaaacggcctcattattccactgcaagccttgttatagcaagatgacttttaccatttatcacccgcttactcacagttttttcacttcttgctggtgattggtttaataaccatcaataaagtgatcacgcagtgaagtaataaggtgcaaaagtaaatataagcatagaaaaatgagtggcgcgaatcctgttggctaattagaatcgccaaccatgaaaacagagactccatccgtaaaaattgttgctatcaccgctgacgaagcggggcaacgtatcgataactttttgcgtacccaattgaaaggcgtaccaaaaagtatgatttaccgtattttgcgtaaaggcgaagtgcgggtgaacaaaaaacgtattaagcctgaatataaactcgaagcgggtgatgaggtgcgtattccaccggttcgcgttgctgagcgggaagaagaggcggtttcgccacatctgcaaaaggtggcggcgctggcggacgtcatcttatatgaagatgatcacatcctggtgctgaataaaccttccggtacggcggtacatggcggcagtggtttaagcttcggcgttattgaaggtttgcgggcgttgcgcccggaagcgcggttccttgaactggttcatcgtcttgaccgggacacctcaggtgttttgctggtagcgaaaaaacgctcggcgttgcgttctctgcatgagcaattacgtgaaaaagggatgcaaaaagattacctggcgctggtgcgcggtcagtggcagtcgcatgtgaagagcgttcaag

(The sequence listing continues in the following parts.)

1. What is claimed is: A method of detecting strain 1687A6 in a patient comprising:
obtaining a fecal sample from a human patient and screening for the presence of strain 1687A6 specific polynucleotides or polypeptides in the sample.

2. The method of claim 1 further comprising isolating nucleic acid sequences present in the fecal sample; and screening for the presence of strain 1687A6 specific sequences in the sample.

3. The method of claim 1 further comprising contacting the sample with an anti-strain 1687A6 antibody; and detecting whether strain 1687A6 is present in the sample by detecting binding between strain 1687A6 and the antibody.

4. The method of claim 1 further comprising detecting strain 1687A6 specific RNA sequences in the sample.

5. A method of determining the levels of strain 1687A6 in the gastrointestinal tract of a patient with inflammatory bowel disease comprising: obtaining a fecal sample from a human patient; isolating RNA from the sample; detecting strain 1687A6 specific RNA in the sample; and comparing the amount of strain 1687A6 specific RNA in the sample to a predetermined level of strain 1687A6 specific RNA.

6. A method of diagnosing IBD in a patient comprising: obtaining a fecal sample from a human patient; isolating nucleotides from the sample; detecting strain 1687A6 specific nucleotides in the sample; and comparing the amount of strain 1687A6 specific nucleotides in the sample to a predetermined level of strain 1687A6 specific nucleotides.

7. A method of identifying a therapeutic composition for treating IBD comprising: (a) determining the amount of strain 1687A6 in the GI of an individual; (b) administering a therapeutic composition to the individual; (c) assaying the effect of the therapeutic composition on the levels of strain 1687A6 or of Th17 cells in the GI of the individual;
(c) comparing the levels of strain 1687A6 in the treated individual with predetermined levels of strain 1687A6 or of Th17 cells in the treated individual with predetermined levels of Th17 cells; and (d) determining whether the therapeutic agent reduces the levels of strain 1687A6 or of Th17 cells in the individual below the predetermined level.

8. The method of claim 7 wherein the method is limited to detecting and determining the levels of Th17.

9. The method of claim 7 wherein the method is limited to detecting and determining the levels of strain 1687A6.

10. A method for modulating an immune response in a subject by administering to a subject a therapeutic composition comprising: (a) the bacterial strain 1687A6; (b) at least one physiologically active substance derived from strain 1687A6; or (c) a fecal sample containing strain 1687A6.

11. The method of claim 10 wherein the immune response comprises inducing differentiation, proliferation, or accumulation of Th17 cells in the subject.

12. A method for identifying a physiologically active substance derived from strain 1687A6 that induces Th17 cell differentiation, proliferation, or accumulation in a subject comprising: (a) sequencing the genome of strain 1687A6; (b) comparing the genome of strain 1687A6 with the genome of at least one E. coli strain that does not normally induce Th17 cell proliferation, accumulation, or differentiation; (c) identifying the differences in nucleotide sequences between the two strains; (d) use recombinant technology to express strain 1687A6 specific sequences in an E. coli strain that does not normally induce Th17 cell proliferation, accumulation, or differentiation; and (e) testing whether the recombinant E. coli induces Th17 cell proliferation, accumulation, or differentiation in a subject.

13. A therapeutic composition containing strain 1687A6 or at least one physiologically active substance derived from strain 1687A6, wherein the composition comprises a: vaccine;
adjuvant; biological; pharmaceutical composition, probiotic; food; beverage; fecal transplant; or a reagent used in an animal model, or a combination of such ingredients.

14. A method for treating a disease in a subject by administering a therapeutic composition containing strain 1687A6 or at least one physiologically active substance derived from strain 1687A6, wherein the composition comprises a: vaccine; adjuvant; biological;
pharmaceutical composition, probiotic; food; beverage; fecal transplant; a reagent used in an animal model; or a combination of such ingredients.

15. The method of claim 14 wherein the disease is an infectious disease.
